(19) United States
(12) Patent Application Publication
(10) Pub. No.: US 2003/0170630 A1
(43) Pub. Date: Sep. 11, 2003

(54) Proteins and nucleic acids encoding same

(76) Inventors: John P. Alsobrook II, Madison, CT (US); Velizar T. Tchernev, Branford, CT (US); Xiaohong Liu, Canton, MA (US); Kimberly A. Spytek, New Haven, CT (US); Bryan D. Zerhusen, Branford, CT (US); Meera Patturajan, Branford, CT (US); Denise M. Lepley, Branford, CT (US); Catherine E. Burgess, Wethersfield, CT (US); Richard A. Shimkets, Guilford, CT (US); William M. Grosse, Branford, CT (US); Edward S. Szekeres JR., Branford, CT (US); Corine A.M. Vernet, Branford, CT (US); Li Li, Branford, CT (US); Stacie J. Casman, North Haven, CT (US); Ference L. Boldog, North Haven, CT (US); Linda Gorman, Branford, CT (US); Esha A. Gangolli, Madison, CT (US); Elma R. Fernandes, Branford, CT (US); Danier K. Rieger, Branford, CT (US); Shlomit R. Edinger, New Haven, CT (US); Erik Gunther, Branford, CT (US); Isabelle Millet, Milford, CT (US); Paul Sciore, North Haven, CT (US); Karen Ellerman, Branford, CT (US); John R. MacDougall, Hamden, CT (US); Glennda Smithson, Guilford, CT (US)

Correspondence Address: Ivor R. Elrifi, Mintz, Levin, Cohn, Ferris,, Glovsky and Popeo, P.C., One Financial Center, Boston, MA, 02111, US

(21) Appl. No.: 10/032,189

(22) Filed: Dec. 21, 2001

Related U.S. Application Data
(60) Provisional application No. 60/257,495, filed on Dec. 21, 2000.
(60) Provisional application No. 60/258,171, filed on Dec. 22, 2000.
(60) Provisional application No. 60/269,940, filed on Feb. 20, 2001.
(60) Provisional application No. 60/274,192, filed on Mar. 8, 2001.
(60) Provisional application No. 60/277,826, filed on Mar. 22, 2001.
(60) Provisional application No. 60/279,840, filed on Mar. 29, 2001.
(60) Provisional application No. 60/282,981, filed on Apr. 11, 2001.
(60) Provisional application No. 60/283,656, filed on Apr. 13, 2001.
(60) Provisional application No. 60/309,247, filed on Jul. 31, 2001.
(60) Provisional application No. 60/311,754, filed on Aug. 10, 2001.
(60) Provisional application No. 60/313,331, filed on Aug. 17, 2001.

(51) Int. Cl. C12Q 1/68; C07H 21/04; C12N 9/00; C12P 21/02; C12N 5/06

(52) U.S. Cl. 435/6; 435/69.1; 435/183; 435/320.1; 435/325; 536/23.2

(57) ABSTRACT

Disclosed herein are nucleic acid sequences that encode novel polypeptides. Also disclosed are polypeptides encoded by these nucleic acid sequences, and antibodies, which immunospecifically-bind to the polypeptide, as well as derivatives, variants, mutants, or fragments of the aforementioned polypeptide, polynucleotide, or antibody. The invention further discloses therapeutic, diagnostic and research methods for diagnosis, treatment, and prevention of disorders involving any one of these novel human nucleic acids and proteins.

### RELATED APPLICATIONS

[0001] This application claims priority from U.S. Ser. Nos. 60/257,495, filed Dec. 21, 2000; 60/258,171 filed Dec. 22, 2000; 60/269,940, filed Feb. 20, 2001; 60/274,192 filed Mar. 8, 2001; 60/277,826, filed Mar. 22,2001; 60/279,840 filed Mar. 29,2001; 60/282,981, filed Apr. 11, 2001; 60/283,656 filed Apr. 13, 2001; 60/309,247, filed Jul. 31, 2001; 60/311,754, filed Aug. 10, 2001; and 60/313,331, filed Aug. 17, 2001; each of which is incorporated by reference in its entirety.

### FIELD OF THE INVENTION

[0002] The invention generally relates to nucleic acids and polypeptides encoded thereby.

### BACKGROUND OF THE INVENTION

[0003] The invention generally relates to nucleic acids and polypeptides encoded therefrom. More specifically, the invention relates to nucleic acids encoding cytoplasmic, nuclear, membrane bound, and secreted polypeptides, as well as vectors, host cells, antibodies, and recombinant methods for producing these nucleic acids and polypeptides.

### SUMMARY OF THE INVENTION

[0004] The invention is based in part upon the discovery of nucleic acid sequences encoding novel polypeptides. The novel nucleic acids and polypeptides are referred to herein as NOVX, or NOV1, NOV2, NOV3, NOV4, NOV5, NOV6, NOV7, NOV8, NOV9, NOV10, NOV11, NOV12, and NOV13 nucleic acids and polypeptides. These nucleic acids and polypeptides, as well as derivatives, homologs, analogs and fragments thereof, will hereinafter be collectively designated as “NOVX” nucleic acid or polypeptide sequences.

[0005] In one aspect, the invention provides an isolated NOVX nucleic acid molecule encoding a NOVX polypeptide that includes a nucleic acid sequence that has identity to the nucleic acids disclosed in SEQ ID NOS: 1, 3, 5, 7, 9, 11, 13, 15, 17, 19, 21, 23, 25, 27, 29, 31, 33, 35, 37, 39, 41, 43, 45, 47, 49, 51, 53, 55, and 57. In some embodiments, the NOVX nucleic acid molecule will hybridize under stringent conditions to a nucleic acid sequence complementary to a nucleic acid molecule that includes a protein-coding sequence of a NOVX nucleic acid sequence. The invention also includes an isolated nucleic acid that encodes a NOVX polypeptide, or a fragment, homolog, analog or derivative thereof. For example, the nucleic acid can encode a polypeptide at least 80% identical to a polypeptide comprising the amino acid sequences of SEQ ID NOS: 2, 4, 6, 8, 10, 12, 14, 16, 18, 20, 22, 24, 26, 28, 30, 32, 34, 26, 28, 40, 42, 44, 46, 48, 50, 52, 54, 56, and 58. The nucleic acid can be, for example, a genomic DNA fragment or a cDNA molecule that includes the nucleic acid sequence of any of SEQ ID NOS: 1, 3, 5, 7, 9, 11, 13, 15, 17, 19, 21, 23, 25, 27, 29, 31,33, 35, 37, 39, 41,43, 45, 47,49, 51, 53, 55, and 57.

[0006] Also included in the invention is an oligonucleotide, e.g., an oligonucleotide which includes at least 6 contiguous nucleotides of a NOVX nucleic acid (e.g., SEQ ID NOS: 3, 5, 7, 9, 11, 13, 15, 17, 19, 21, 23, 25, 27, 29, 31, 33, 35, 37, 39, 41, 43, 45, 47, 49, 51, 53, 55, and 57) or a complement of said oligonucleotide.

[0007] Also included in the invention are substantially purified NOVX polypeptides (SEQ ID NOS: 2, 4, 6, 8, 10, 12, 14, 16, 18, 20, 22, 24, 26, 28, 30, 32, 34, 26, 28,40, 42, 44, 46,48, 50, 52, 54, 56, and 58). In certain embodiments, the NOVX polypeptides include an amino acid sequence that is substantially identical to the amino acid sequence of a human NOVX polypeptide.

[0008] The invention also features antibodies that immunoselectively bind to NOVX polypeptides, or fragments, homologs, analogs or derivatives thereof.

[0009] In another aspect, the invention includes pharmaceutical compositions that include therapeutically- or prophylactically-effective amounts of a therapeutic and a pharmaceutically-acceptable carrier. The therapeutic can be, e.g., a NOVX nucleic acid, a NOVX polypeptide, or an antibody specific for a NOVX polypeptide. In a further aspect, the invention includes, in one or more containers, a therapeutically- or prophylactically-effective amount of this pharmaceutical composition.

[0010] In a further aspect, the invention includes a method of producing a polypeptide by culturing a cell that includes a NOVX nucleic acid, under conditions allowing for expression of the NOVX polypeptide encoded by the DNA. If desired, the NOVX polypeptide can then be recovered.

[0011] In another aspect, the invention includes a method of detecting the presence of a NOVX polypeptide in a sample. In the method, a sample is contacted with a compound that selectively binds to the polypeptide under conditions allowing for formation of a complex between the polypeptide and the compound. The complex is detected, if present, thereby identifying the NOVX polypeptide within the sample.

[0012] The invention also includes methods to identify specific cell or tissue types based on their expression of a NOVX.

[0013] Also included in the invention is a method of detecting the presence of a NOVX nucleic acid molecule in a sample by contacting the sample with a NOVX nucleic acid probe or primer, and detecting whether the nucleic acid probe or primer bound to a NOVX nucleic acid molecule in the sample.

[0014] In a further aspect, the invention provides a method for modulating the activity of a NOVX polypeptide by contacting a cell sample that includes the NOVX polypeptide with a compound that binds to the NOVX polypeptide in an amount sufficient to modulate the activity of said polypeptide. The compound can be, e.g., a small molecule, such as a nucleic acid, peptide, polypeptide, peptidomimetic, carbohydrate, lipid or other organic (carbon containing) or inorganic molecule, as further described herein.

[0015] Also within the scope of the invention is the use of a therapeutic in the manufacture of a medicament for treating or preventing disorders or syndromes including, e.g., asthma, allergies, emphysema, bronchitis, autoimmune disease, immunodeficiencies, transplantation, graft versus host disease, arthritis, tendonitis, scleroderma, systemic lupus erythematosus, ARDS, lymphedema, allergic encephalomyelitis, experimental allergic encephalomyelitis (EAE), various forms of arthritis, bacterial infections, cystic fibrosis, lung cancer, adrenoleukodystrophy, congenital adrenal hyperplasia, leukodystrophies, cancer such as AML, coronary artery disease, stroke, hypertension, myocardial infarction, atherosclerosis, hemophilia, hypercoagulation, idiopathic thrombocytopenic purpura, aneurysm, hypertension, myocardial infarction, embolism, cardiovascular disorders, bypass surgery, hypertriglyceridemia, hypoalphalipoproteinemia, hyperlipidemia, noninsulin-dependent diabetes mellitus, obesity, diabetes, Diabetes insipidus nephrogenic, autosomal dominant; Diabetes insipidus, nephrogenic, autosomal recessive; Tangier disease, LCAT deficiency, ‘fish-eye’ disease, Von Hippel-Lindau (VHL) syndrome, tuberous sclerosis, hypercalceimia, Lesch-Nyhan syndrome, cirrhosis, inflammatory bowel disease, diverticular disease, Hirschsprung's disease, Crohn's Disease, appendicitis, ulcers, laryngitis, muscular dystrophy, myasthenia gravis, endometriosis, pancreatitis, hyperparathyroidism, hypoparathyroidism, xerostomia, psoriasis, actinic keratosis, acne, hair growth/loss, allopecia, pigmentation disorders, endocrine disorders, tonsillitis, cystitis, incontinence, uveitis, corneal fibroblast proliferation, amyotrophic lateral sclerosis, acute pancreatitis, cerebral cryptococcosis, colitis, thyroiditis, nonsyndromic deafness, keratinization disorders, gap-junction-related neuropathies and other pathological conditions of the nervous system, where dysfunctions of junctional communication are considered to play a casual role, demyelinating neuropathies (including Charcot-Marie-Tooth disease), erythrokeratodermia variabilis (EKV), atrioventricular (AV) conduction defects such as arrhythmia, lens cataract, osteoporosis, osteoarthirtis, Achalasia-addisonianism-alacrimia syndrome; Cataract, polymorphic and lamellar; Cyclic ichthyosis with epidermolytic hyperkeratosis; Enuresis, nocturnal, 2; Epidermolysis bullosa simplex, Koebner, Dowling-Meara, and Weber-Cockayne types; Epidermolytic hyperkeratosis; Fundus albipunctatus; Glioma; Ichthyosis bullosa of Siemens; Keratoderma, palmoplantar, nonepidermolytic; Meesmann corneal dystrophy; Monilethrix; Myopathy, congenital; Pachyonychia congenita, Jackson-Lawler type; Pachyonychia congenita, Jadassohn-Lewandowsky type; Palmoplantar keratoderma, Bothnia type; Persistent Mullerian duct syndrome, type II; Spastic paraplegia-10; White sponge nevus; Liver disease, susceptibility to, from hepatotoxins or viruses; Alzheimer's disease, Parkinson's disease, Huntington's disease, cerebral palsy, epilepsy, multiple sclerosis, ataxia-telangiectasia, behavioral disorders, addiction, anxiety, pain, neuroprotection, fertility, growth and reproductive disorders, renal artery stenosis, interstitial nephritis, glomerulonephritis, polycystic kidney disease, renal tubular acidosis, IgA nephropathy, and/or other pathologies and disorders of the like.

[0016] The therapeutic can be, e.g., a NOVX nucleic acid, a NOVX polypeptide, or a NOVX-specific antibody, or biologically-active derivatives or fragments thereof.

[0017] For example, the compositions of the present invention will have efficacy for treatment of patients suffering from the diseases and disorders disclosed above and/or other pathologies and disorders of the like. The polypeptides can be used as immunogens to produce antibodies specific for the invention, and as vaccines. They can also be used to screen for potential agonist and antagonist compounds. For example, a cDNA encoding NOVX may be useful in gene therapy, and NOVX may be useful when administered to a subject in need thereof. By way of non-limiting example, the compositions of the present invention will have efficacy for treatment of patients suffering from the diseases and disorders disclosed above and/or other pathologies and disorders of the like.

[0018] The invention further includes a method for screening for a modulator of disorders or syndromes including, e.g., the diseases and disorders disclosed above and/or other pathologies and disorders of the like. The method includes contacting a test compound with a NOVX polypeptide and determining if the test compound binds to said NOVX polypeptide. Binding of the test compound to the NOVX polypeptide indicates the test compound is a modulator of activity, or of latency or predisposition to the aforementioned disorders or syndromes.

[0019] Also within the scope of the invention is a method for screening for a modulator of activity, or of latency or predisposition to disorders or syndromes including, e.g., the diseases and disorders disclosed above and/or other pathologies and disorders of the like by administering a test compound to a test animal at increased risk for the aforementioned disorders or syndromes. The test animal expresses a recombinant polypeptide encoded by a NOVX nucleic acid. Expression or activity of NOVX polypeptide is then measured in the test animal, as is expression or activity of the protein in a control animal which recombinantly-expresses NOVX polypeptide and is not at increased risk for the disorder or syndrome. Next, the expression of NOVX polypeptide in both the test animal and the control animal is compared. A change in the activity of NOVX polypeptide in the test animal relative to the control animal indicates the test compound is a modulator of latency of the disorder or syndrome.

[0020] In yet another aspect, the invention includes a method for determining the presence of or predisposition to a disease associated with altered levels of a NOVX polypeptide, a NOVX nucleic acid, or both, in a subject (e.g., a human subject). The method includes measuring the amount of the NOVX polypeptide in a test sample from the subject and comparing the amount of the polypeptide in the test sample to the amount of the NOVX polypeptide present in a control sample. An alteration in the level of the NOVX polypeptide in the test sample as compared to the control sample indicates the presence of or predisposition to a disease in the subject. Preferably, the predisposition includes, e.g., the diseases and disorders disclosed above and/or other pathologies and disorders of the like. Also, the expression levels of the new polypeptides of the invention can be used in a method to screen for various cancers as well as to determine the stage of cancers.

[0021] In a further aspect, the invention includes a method of treating or preventing a pathological condition associated with a disorder in a mammal by administering to the subject a NOVX polypeptide, a NOVX nucleic acid, or a NOVX-specific antibody to a subject (e.g. a human subject), in an amount sufficient to alleviate or prevent the pathological condition. In preferred embodiments, the disorder, includes, e.g., the diseases and disorders disclosed above and/or other pathologies and disorders of the like.

[0022] In yet another aspect, the invention can be used in a method to identity the cellular receptors and downstream effectors of the invention by any one of a number of techniques commonly employed in the art. These include but are not limited to the two-hybrid system, affinity purification, co-precipitation with antibodies or other specific-interacting molecules.

[0023] Unless otherwise defined, all technical and scientific terms used herein have the same meaning as commonly understood by one of ordinary skill in the art to which this invention belongs. Although methods and materials similar or equivalent to those described herein can be used in the practice or testing of the present invention, suitable methods and materials are described below. All publications, patent applications, patents, and other references mentioned herein are incorporated by reference in their entirety. In the case of conflict, the present specification, including definitions, will control. In addition, the materials, methods, and examples are illustrative only and not intended to be limiting.

[0024] Other features and advantages of the invention will be apparent from the following detailed description and claims.

### DETAILED DESCRIPTION OF THE INVENTION

[0025] The present invention provides novel nucleotides and polypeptides encoded thereby. Included in the invention are the novel nucleic acid sequences and their encoded polypeptides. The sequences are collectively referred to herein as “NOVX nucleic acids” or “NOVX polynucleotides” and the corresponding encoded polypeptides are referred to as “NOVX polypeptides” or “NOVX proteins.” Unless indicated otherwise, “NOVX” is meant to refer to any of the novel sequences disclosed herein. Table A provides a summary of the NOVX nucleic acids and their encoded polypeptides.

TABLE A
Sequences and Corresponding SEQ ID Numbers

| | | SEQ ID | | |
|---|---|---|---|---|
| | | NO | | |
| NOVX | | (nucleic | SEQ ID NO | |
| Assignment | Internal Identification | acid) | (polypeptide) | Homology |
| 1a | CG55750-01 | 1 | 2 | Airway Trypsin-Like |
| | | | | Protease-like |
| 1b | 168446573 | 3 | 4 | Airway Trypsin-Like |
| | | | | Protease-like |
| 1c | 168446539 | 5 | 6 | Airway Trypsin-Like |
| | | | | Protease-like |
| 1d | 168446547 | 7 | 8 | Airway Trypsin-Like |
| | | | | Protease-like |
| 2 | CG55782-01 | 9 | 10 | P450-like |
| 3a | CG55771-01 | 11 | 12 | Apolipoprotein A-I |
| | | | | precursor-like |
| 3b | CG55771-02 | 13 | 14 | Apolipoprotein A-I |
| | | | | precursor-like |
| 4a | CG55700-01 | 15 | 16 | HSP90 co-chaperone-like |
| 4b | CG55700-02 | 17 | 18 | HSP90 Co-Chaperone |
| | | | | (Progesterone Receptor |
| | | | | Complex P23) - like |
| 4c | CG55700-03 | 19 | 20 | HSP90 co-chaperone-like |
| 5 | CG55706-01 | 21 | 22 | Type III adenylyl cyclase- |
| | | | | like |
| 6a | CG50389-02 | 23 | 24 | Interleukin 1 receptor |
| | | | | related protein-like |
| 6b | CG50389-03 | 25 | 26 | Interleukin 1 receptor |
| | | | | related protein-like |
| 6c | CG50389-04 | 27 | 28 | Interleukin 1 receptor |
| | | | | related protein-like |
| 7 | CG50389-01 | 29 | 30 | Interleukin 1 receptor |
| | | | | related protein-like |
| 8 | CG50387-02 | 31 | 32 | Connexin GJA3-like |
| 9 | CG50271-01 | 33 | 34 | Olfactory Receptor-like |
| 10 | CG55844-01 | 35 | 36 | P450-like |
| 11a | CG55752-01 | 37 | 38 | Alpha Glucosidase 2, Alpha |
| | | | | Neutral Subunit-like |
| 11b | CG55752-02 | 39 | 40 | Alpha Glucosidase 2-like |
| 11c | CG55752-03 | 41 | 42 | Glucosidase II-like |
| 11d | CG55752-04 | 43 | 44 | Glucosidase II-like |
| 12a | CG55776-01 | 45 | 46 | Mechanical stress induced |
| | | | | protein-like |
| 12b | 174124289 | 47 | 48 | Mechanical stress induced |
| | | | | protein-like |
| 12c | 174124313 | 49 | 50 | Mechanical stress induced |
| | | | | protein-like |
| 12d | 174124322 | 51 | 52 | Mechanical stress induced |
| | | | | protein-like |
| 12e | 174124322 | 53 | 54 | Mechanical stress induced |
| | | | | protein-like |
| 12f | CG55776-03 | 55 | 56 | Mechanical stress induced |
| | | | | protein-like |
| 13 | CG55908-01 | 57 | 58 | Integrin-like FG-GAP domain |
| | | | | containing novel protein- |
| | | | | like |

[0026] NOVX nucleic acids and their encoded polypeptides are useful in a variety of applications and contexts. The various NOVX nucleic acids and polypeptides according to the invention are useful as novel members of the protein families according to the presence of domains and sequence relatedness to previously described proteins. Additionally, NOVX nucleic acids and polypeptides can also be used to identify proteins that are members of the family to which the NOVX polypeptides belong.

[0027] NOV1 is homologous to a Airway Trypsin-Like Protease-like family of proteins. Thus, the NOV1 nucleic acids, polypeptides, antibodies and related compounds according to the invention will be useful in therapeutic and diagnostic applications implicated in, for example; asthma and cystic fibrosis, allergies, emphysema, bronchitis, lung cancer, or other pathologie or conditions.

[0028] NOV2 is homologous to the P450-like family of proteins. Thus NOV2 nucleic acids, polypeptides, antibodies and related compounds according to the invention will be useful in therapeutic and diagnostic applications implicated in various pathologies and disorders.

[0029] NOV3 is homologous to a family of Apolipoprotein A-I precursor-like proteins. Thus, the NOV3 nucleic acids and polypeptides, antibodies and related compounds according to the invention will be useful in therapeutic and diagnostic applications implicated in, for example: coronary artery disease, stroke, hypertriglyceridemia, hypoalphalipoproteinemia, hyperlipidemia, Tangier disease, LCAT deficiency, ‘fish-eye’ disease, noninsulin-dependent diabetes mellitus, hypertension, myocardial infarction, atherosclerosis, and/or other pathologies.

[0030] NOV4 is homologous to the HSP90 co-chaperone-like family of proteins. Thus, NOV4 nucleic acids, polypeptides, antibodies and related compounds according to the invention will be useful in therapeutic and diagnostic applications implicated in, for example: adrenoleukodystrophy, congenital adrenal hyperplasia, hemophilia, hypercoagulation, idiopathic thrombocytopenic purpura, autoimmune disease, allergies, asthma, immunodeficiencies, transplantation, graft versus host disease, Von Hippel-Lindau (VHL) syndrome, Alzheimer's disease, stroke, tuberous sclerosis, hypercalceimia, Parkinson's disease, Huntington's disease, cerebral palsy, epilepsy, Lesch-Nyhan syndrome, multiple sclerosis, ataxia-telangiectasia, leukodystrophies, behavioral disorders, addiction, anxiety, pain, neuroprotection, arthritis, tendonitis, fertility, atherosclerosis, aneurysm, hypertension, fibromuscular dysplasia, stroke, scleroderma, obesity, myocardial infarction, embolism, cardiovascular disorders, bypass surgery, cirrhosis, inflammatory bowel disease, diverticular disease, Hirschsprung's disease, Crohn's Disease, appendicitis, ulcers, diabetes, renal artery stenosis, interstitial nephritis, glomerulonephritis, polycystic kidney disease, systemic lupus erythematosus, renal tubular acidosis, IgA nephropathy, laryngitis, emphysema, ARDS, lymphedema, muscular dystrophy, myasthenia gravis, endometriosis, pancreatitis, hyperparathyroidism, hypoparathyroidism, growth and reproductive disorders, xerostomia, psoriasis, actinic keratosis, acne, hair growth/loss, allopecia, pigmentation disorders, endocrine disorders, tonsillitis, cystitis, incontinence, and/or other pathologies.

[0031] NOV5 is homologous to the Type III adenylyl cyclase-like family of proteins. Thus NOV5 nucleic acids, polypeptides, antibodies and related compounds according to the invention will be useful in therapeutic and diagnostic applications implicated in, diabetes, heart failure, neurological diseases such as epilepsy, sleep disorder, parkinsonism, Huntington's disease, Alzheimer's disease, depression, schizophrenia diseases, disorders and conditions.

[0032] NOV6 is homologous to the Interleukin 1 receptor related protein-like family of proteins. Thus NOV6 nucleic acids, polypeptides, antibodies and related compounds according to the invention will be useful in therapeutic and diagnostic applications implicated in, for example: uveitis and corneal fibroblast proliferation, allergic encephalomyelitis, amyotrophic laternal sclerosis, acute pancreatitis, cerebral cryptococcosis, autoimmune disease including Type 1 diabetes mellitus (DM), experimental allergic encephalomyelitis (EAE), systemic lupus erythematosus (SLE), colitis, thyroiditis and various forms of arthritis, cancer such as AML, bacterial infections, and/or other pathologies/disorders.

[0033] NOV7 is homologous to members of the Interleukin 1 receptor related protein-like family of proteins. Thus, the NOV7 nucleic acids, polypeptides, antibodies and related compounds according to the invention will be useful in therapeutic and diagnostic applications implicated in, for example; uveitis and corneal fibroblast proliferation, allergic encephalomyelitis, amyotrophic lateral sclerosis, acute pancreatitis, cerebral cryptococcosis, autoimmune disease including Type 1 diabetes mellitus (DM), experimental allergic encephalomyelitis (EAE), systemic lupus erythematosus (SLE), colitis, thyroiditis and various forms of arthritis, cancer such as AML, bacterial infections, and/or other pathologies/disorders.

[0034] NOV8 is homologous to the connexin GJA3-like family of proteins. Thus, NOV8 nucleic acids and polypeptides, antibodies and related compounds according to the invention will be useful in therapeutic and diagnostic applications implicated in, for example; ) nonsyndromic deafness, keratinization disorders, gap-junction-related neuropathies and other pathological conditions of the nervous system, where dysfunctions of junctional communication are considered to play a casual role, demyelinating neuropathies (including Charcot-Marie-Tooth disease), erythrokeratodermia variabilis (EKV), atrioventricular (AV) conduction defects such as arrhythmia, lens cataract, and/or other pathologies/disorders.

[0035] NOV9 is homologous to the Olfactory Receptor-like family of proteins. Thus, NOV9 nucleic acids and polypeptides, antibodies and related compounds according to the invention will be useful in therapeutic and diagnostic applications implicated in various pathologies or disorders.

[0036] NOV10 is homologous to the P450-like family of proteins. Thus, NOV10 nucleic acids and polypeptides, antibodies and related compounds according to the invention will be useful in various pathologies or disorders.

[0037] NOV11 is homologous to the Integrin-like FG-GAP domain containing novel protein-like family of proteins. Thus, NOV11 nucleic acids and polypeptides, antibodies and related compounds according to the invention will be useful in therapeutic and diagnostic applications implicated in various pathologies or disorders.

[0038] NOV12 is homologous to the Mechanical stress induced protein-like family of proteins. Thus, NOV12 nucleic acids and polypeptides, antibodies and related compounds according to the invention will be useful in therapeutic and diagnostic applications implicated in, for example; osteoporosis, osteoarthritis, cardiac hypertrophy, atherosclerosis, hypertension, restenosis, and/or other pathologies/disorders.

[0039] NOV13 is homologous to the Integrin-like FG-GAP domain containing novel protein-like family of proteins. Thus, NOV13 nucleic acids and polypeptides, antibodies and related compounds according to the invention will be useful in therapeutic and diagnostic applications implicated in, for example; Achalasia-addisonianism-alacrimia syndrome; Cataract, polymorphic and lamellar; Cyclic ichthyosis with epidermolytic hyperkeratosis; Diabetes insipidus, nephrogenic, autosomal dominant; Diabetes insipidus, nephrogenic, autosomal recessive; Enuresis, nocturnal, 2; Epidermolysis bullosa simplex, Koebner, Dowling-Meara, and Weber-Cockayne types; Epidermolytic hyperkeratosis; Fundus albipunctatus; Glioma; Ichthyosis bullosa of Siemens; Keratoderma, palmoplantar, nonepidermolytic; Meesmann corneal dystrophy; Monilethrix; Myopathy, congenital; Pachyonychia congenita, Jackson-Lawler type; Pachyonychia congenita, Jadassohn-Lewandowsky type; Palmoplantar keratoderma, Bothnia type; Persistent Mullerian duct syndrome, type II; Spastic paraplegia-10; White sponge nevus; Liver disease, susceptibility to, from hepatotoxins or viruses; Von Hippel-Lindau (VHL) syndrome, Alzheimer's disease, stroke, tuberous sclerosis, hypercalceimia, Parkinson's disease, Huntington's disease, cerebral palsy, epilepsy, Lesch-Nyhan syndrome, multiple sclerosis, ataxia-telangiectasia, leukodystrophies, behavioral disorders, addiction, anxiety, pain, neuroprotection; lymphedema, allergies, and/or other pathologies/disorders.

[0040] The NOVX nucleic acids and polypeptides can also be used to screen for molecules, which inhibit or enhance NOVX activity or function. Specifically, the nucleic acids and polypeptides according to the invention may be used as targets for the identification of small molecules that modulate or inhibit, e.g., neurogenesis, cell differentiation, cell proliferation, hematopoiesis, wound healing and angiogenesis.

[0041] Additional utilities for the NOVX nucleic acids and polypeptides according to the invention are disclosed herein.

[0042] NOV1

[0043] NOV1 includes three novel Airway Trypsin-Like Protease-like proteins disclosed below. The disclosed sequences have been named NOV1a, NOV1b, and NOV1c.

[0044] NOV1a

[0045] A disclosed NOV1a nucleic acid of 1386 nucleotides (also referred to as CG55750-01) encoding a Airway Trypsin-Like Protease-like protein is shown in Table 1A. An open reading frame was identified beginning with an ATG initiation codon at nucleotides 64-66 and ending with a TGA codon at nucleotides 1324-1326. A putative untranslated region upstream from the initiation codon and downstream from the termination codon is underlined in Table 1A. The start and stop codons are in bold letters.

TABLE 1A
NOV1a nucleotide sequence.

+TR,1(SEQ ID NO:1)

AAAAGGAACATTTAGTCTTAAAATCCTATTCATTTTTAACACACAATTCTTTCTCAAAAGGCCATGACACTG
GGTAGAAGAGTGAGTTCACTGAAACCATGGATGTTTGCCCTTATTGTCAGAGCTGTTGTGTTGATTCTGGTG
ATACTCATTGGTCTCCTTGTTTATTTTTTGGCATATAAGTTTTACTATTACCAAACCTCCTTCCAGATCCCC
AGTATTGAATATAATTTAGCTATTAATACTTGTGTGACACAAGAGGAGAGAATCTATGACAATAAAATGTGT
AAAATAATGTCTAGGATATTTCGACATTCTTCTGTAGGCGGTCGATTTATCAAATCTCATGTTATCAAATTA
AGGCCAAGTAATGACAATTTGAAAGCAGATGTATTGCTTAAATTTCAGTTTATTCCTAACAATGAGAACGCA
ATAAAAACACAAGCTGATAACATTTTGCATCAGAAGTTGAAATCAAATGAAAGCTCTTTGACCATAAACAAA
CCATCATTTAGACTCACACCTATTGACAGCAAAAAGATGAGGAATCTTCTCAACAGTCGCTGTGGAATAAGG
ATGACATCTTCAAACATGCCATTACCAGCATCCTCTTCTACTCAAAGAATTGTCCAAGGAAGGGAAACAGCT
ATGGAAGGGGAATGGCCATGGCAGGCCAGCCTCCAGCTCATAGGGTCAGGCCATCAGTGTGGAGCCAGCCTC
ATCAGTAACACATGGCTGCTCACAGCAGCTCACTGCTTTTGGAAAAATAAAGACCCAAGTCAATGGATTGCT
ACTTTTGGTGCAACTATAACACCACCCGCAGTGAAACGAAATGTGAGGAAAATTATTCTTCATGAGAATTAC
CATAGAGAAACAAATGAAAATGACATTGCTTTGGTTCAGCTCTCTACTGGAGTTGAGTTTTCAAATATAGTC
CAGAGAGTTTGCCTCCCAGACTCATCTATAAAGTTGCCACCTAAAACAAGTGTGTTCGTCACAGGATTTGGA
TCCATTGTAGATGATGGACCTATACAAAATACACTTCGGCAAGCCAGAGTGGAAACCATAAGCACTGATGTG
TGTAACAGAAAGGATGTGTATGATGGCCTGATAACTCCAGGAATGTTATGTGCTGGATCCATGGAAGGAAAA
ATAGATGCATGTAAGGGAGATTCTGGTGGACCTCTGGTTTATGATAATCATGACATCTGGTACATTGTAGGT
ATAGTAAGTTGGGGACAATCATGTGCACTTCCCAAAAAACCTGGAGTCTACACCAGAGTAACTAAGTATCGA
GATTGGATTGCCTCAAAGACTGGTATGTAGTGTGGATTGTCCATGAGTTATACACATGGCACACAGAGCTGA
TACTCCTGCGTATTTGTA

[0046] In a search of public sequence databases, the NOV1a nucleic acid sequence, located on chromsome 4 has 489 of 707 bases (69%) identical to a gb:GENBANK-ID:AF064819|acc:AF064819.1 mRNA from Homo sapiens (Homo sapiens serine protease DESC1 (DESC1) mRNA, complete cds). Public nucleotide databases include all GenBank databases and the GeneSeq patent database.

[0047] In all BLAST alignments herein, the “E-value” or “Expect” value is a numeric indication of the probability that the aligned sequences could have achieved their similarity to the BLAST query sequence by chance alone, within the database that was searched. For example, the probability that the subject (“Sbjct”) retrieved from the NOV1 BLAST analysis, e.g., Airway Trypsin-Like Protease mRNA from Homo sapiens, matched the Query NOV1 sequence purely by chance is 1.3e⁻⁴¹. The Expect value (E) is a parameter that describes the number of hits one can “expect” to see just by chance when searching a database of a particular size. It decreases exponentially with the Score (S) that is assigned to a match between two sequences. Essentially, the E value describes the random background noise that exists for matches between sequences.

[0048] The Expect value is used as a convenient way to create a significance threshold for reporting results. The default value used for blasting is typically set to 0.0001. In BLAST 2.0, the Expect value is also used instead of the P value (probability) to report the significance of matches. For example, an E value of one assigned to a hit can be interpreted as meaning that in a database of the current size one might expect to see one match with a similar score simply by chance. An E value of zero means that one would not expect to see any matches with a similar score simply by chance. See, e.g., http://www.ncbi.nlm.nih.gov/Education/BLASTinfo/. Occasionally, a string of X's or N's will result from a BLAST search. This is a result of automatic filtering of the query for low-complexity sequence that is performed to prevent artifactual hits. The filter substitutes any low-complexity sequence that it finds with the letter “N” in nucleotide sequence (e.g., “NNNNNNNNNNNNN”) or the letter “X” in protein sequences (e.g., “XXXXXXXXX”). Low-complexity regions can result in high scores that reflect compositional bias rather than significant position-by-position alignment. (Wootton and Federhen, Methods Enzymol 266:554-571, 1996).

[0049] The disclosed NOV1a polypeptide (SEQ ID NO: 2) encoded by SEQ ID NO: 1 has 420 amino acid residues and is presented in Table 1B using the one-letter amino acid code. Signal P, Psort and/or Hydropathy results predict that NOV1a has a signal peptide and is likely to be localized in the plasma membrane with a certainty of 0.6850. In other embodiments, NOV1a may also be localized to the endoplasmic reticulum (membrane) with acertainty of 0.6400, the Golgi body with a certainty of 0.1700 or in the endoplasmic reticulum (lumen) with a certainty of 0.1000. The most likely cleavage site for a NOV1a peptide is between amino acids 38 and 39, at: FLA-YK.

TABLE 1B
Encoded NOV1a protein sequence.

(SEQ ID NO:2)

| | |
|---|---|
| MTLGRRVSSLKPWMFALIVRAVVLILVILIGLLVYFLAYKFYYYQTSFQIPSIEYNLAINTCVTOEERIYDN | +TL,45 |
| KMCKIMSRIFRHSSVGGRFIKSHVIKLRPSNDNLKAnVLLKFQFIPNNENAIKTOADNILHQKIKSNESSLT | |
| INKPSFRLTPIDSKRNLLNSRCGIRMTSSNMPLPASSSTORIVQGRETAJVIEGEWPWQASLQLIGSGHQCG | |
| ASLISNTWLLTAAHCFWKNKDPTQWIATFGATITPPAVKRNVRKIILHENYHRETNENDIALVQLSTGVEFS | |
| NIVQRVCLPDSSIKLPPKTSVFVTGFGSIVDDGPIQNTLRQARVETISTDVCNRKDVYDGLITPGMLCAGFM | |
| EGKIDACKGDSGGPLVYDNHDIWYIVGIVSWGQSCALPKKPGVYTRVTKYRDWIASKTGM+TZ,1/45 | |

[0050] A search of sequence databases reveals that the NOV1 a amino acid sequence has 192 of 411 amino acid residues (46%) identical to, and 267 of 411 amino acid residues (64%) similar to, the 418 amino acid residue ptnr:SPTREMBL-ACC:060235 protein from Homo sapiens (Human) (Airway Trypsin-Like Protease) (E=3.1e⁻⁹⁵). Public amino acid databases include the GenBank databases, SwissProt, PDB and PIR.

[0051] NOV1b

[0052] A disclosed NOV1b nucleic acid of 708 nucleotides (also referred to as 168446573) encoding a novel Airway Trypsin-Like Protease-like protein is shown in Table 1C. An open reading frame was identified beginning with an AGA initiation codon at nucleotides 1-3 and ending at nucleotides 706-708. The start codon is in bold letters in Table 1C. Since the start codon of NOV1b is not a traditional initiation codon, and NOV1b has no termination codon, NOV1b could be a partial open reading frame that could be extended in the 5′ and/or 3′ direction(s).

TABLE 1C
NOV1b nucleotide sequence.

(SEQ ID NO:3)
AGATCTGTCCAAGGAAGGGAAACAGCTATGGAAGGGGAATGGCCATGGCAGGCCAGCCTCCAGCTCATAGGG
TCAGGCCATCAGTGTGGAGCCAGCCTCATCAGTAACACATGGCTGCTCACAGCAGCTCACTGCTTTTGGAAA
AATAAAGACCCAACTCAATGGATTGCTACTTTTGGTGCAACTATAACACCACCCGCAGTGAAACGAAATGTG
AGGAAAATTATTCTTCATGAGAATTACCATAGAGAAACAAATGAAAATGACATTGCTTTGGTTCAGCTCTCT
ACTGGAGTCGGGTTTTCAAATATAGTCCAGAGAGTTTGCCTCCCAGACTCATCTATAAAGTTGCCACCTAAA
ACAAGTGTGTTCGTCACAGGATTTGGATCCATTGTAGATGATGGACCTATACAAAATACACTTCGGCAAGCC
AGAGTGGAAACCATAAGCACTGATGTGTGTAACAGAAAGGATGTGTATGATGGCCTGATAACTCCAGGAATG
TTATGTGCTGGATTCATGGAAGGAAAAATAGATGCATGTAAGGGAGATTCTGGTGGACCTCTGGTTTATGAT
AATCATGACATCTGGTACATTGTAGGTATAGTAAGTTGGGGACAATCATGTGCACTTCCCAAAAAACCTGGA
GTCTACACCAGAGTAACTAAGTATCGAGATTGGATTGCCTCAAAGACTGGTATGCTCGAG

[0053] The disclosed NOV1b polypeptide (SEQ ID NO: 4) encoded by SEQ ID NO: 3 has 236 amino acid residues and is presented in Table 1D using the one-letter amino acid code.

TABLE 1D
Encoded NOV1b protein sequence.

(SEQ ID NO:4)

RSVQGRETANEGEWOWQASKQKUGSGHQCGASLISNTWLLTAAHCFWKNKDPTQWIATFGATITPPAVKRNV
RKIILHENYHRETNENDIALVQLSTGVGFSNIVQRVCLPDSSIKLPPKTSVFVTGFGSIVDDGPIQNTLRQA
RVETISTDVCNRKDVYDGLITPGMLCAGFMEGKIDACKGDSGGPLVYDNHDIWYIVGIVSWGQSCALPKKPG
VYTRVTKYRDWIASKTGMLE

[0054] NOV1c

[0055] A disclosed NOV1c nucleic acid of 708 nucleotides (also referred to as 168446539) encoding a novel Airway Trypsin-Like Protease-like protein is shown in Table 1E. An open reading frame was identified beginning with an AGA initiation codon at nucleotides 1-3 and ending at nucleotides 706-708. The start codon is in bold letters in Table 1E. Since the start codon of NOV1c is not a traditional initiation codon, and NOV1c has no termination codon, NOV1c could be a partial open reading frame that could be extended in the 5′ and/or 3′ direction(s).

TABLE 1E
NOV1c nucleotide sequence.

(SEQ ID NO:5)

AGATCTGTCCAAGGAAGGGAAACAGCTATGGAAGGGGAATGGCCATGGCAGGCCAGCCTCCAGCTCATAGGG
TCAGGCCATCAGTGTGGAGCCAGCCTCATCAGTAACACATGGCTGCTCACAGCAGCTCACTGCTTTTGGAAA
AATAAAGACCCAACTCAATGGATTGCTACTTTTGGTGCAACTATAACACCACCCGCAGTGAAACGAAATGTG
AGGAAAATTATTCTTCATGAGAATTACCATAGAGAAACAAATGAAAATGACATTGCTTTGGTTCAGCTCTCT
ACTGGAGTTGAGTTTTCAAATATAGTCCAGAGAGTTTACCTCCCAGACTCATCTATAAAGTTGCCACCTAAA
ACAAGTGTGTTCGTCACAGGATTTGGATCCATTGTAGATGATGGACCTATACAAAATACACTTCGGCAAGCC
AGAGTGGAAACCATAAGCACTGATGTGTGTAACAGAAAGGATGTGTATGATGGCCTGATAACTCCAGGAATG
TTATGTGCTGGATTCATGGAAGGAAAAATAGATGCATGTAAGGGAGATTCTGGTGGACCTCTGGTTTATGAT
AATCATGACATCTGGTACATTGTAGGTATAGTAAGTTGGGGACAATCATGTGCACTTCCCAAAAAACCTGGA
GTCTACACCAGAGTAACTAAGTATCGAGATTGOATTGCCTCAAAGACTGGTATGCTCGAG

[0056] The reverse complement is shown in Table 1F.

TABLE 1F
NOV1c reverse complement nucleotide sequence.

(SEQ ID NO:59)

CTCGAGCATACCAGTCTTTGAGGCAATCCAATCTCGATACTTAGTTACTCTGGTGTAGACTCCAGGTTTTTT
GGGAAGTGCACATGATTGTCCCCAACTTACTATACCTACAATGTACCAGATGTCATGATTATCATAAACCAG
AGGTCCACCAGAATCTCCCTTACATGCATCTATTTTTCCTTCCATGAATCCAGCACATAACATTCCTGGAGT
TATCAGGCCATCATACACATCCTTTCTGTTACACACATCAGTGCTTATGGTTTCCACTCTGGCTTGCCGAAG
TGTATTTTGTATAGGTCCATCATCTACAATGGATCCAAATCCTGTGACGAACACACTTGTTTTAGGTGGCAA
CTTTATAGATGAGTCTGCGAGGTAAACTCTCTGGACTATATTTGAAAACTCAACTCCAGTAGAGAGCTGAAC
CAAAGCAATGTCATTTTCATTTGTTTCTCTATGGTAATTCTCATGAAGAATAATTTTCCTCACATTTCGTTT
CACTGCGGGTGGTGTTATAGTTGCACCAAAAGTAGCAATCCATTGAGTTGGGTCTTTATTTTTCCAAAAGCA
GTGAGCTGCTGTGAGCAGCCATGTGTTACTGATGAGGCTGGCTCCACACTCATGGCCTCACCCTATGAGCTC
GACGCTGGCCTGCCATGGCCATTCCCCTTCCATAGCTGTTTCCCTTCCTTGGACAGATCT

[0057] The disclosed NOV1c polypeptide (SEQ ID NO: 6) encoded by SEQ ID NO: 5 has 236 amino acid residues and is presented in Table 1G using the one-letter amino acid code.

TABLE 1G
Encoded NOV1c protein sequence.

| | |
|---|---|
| RSVQGRETAMEGEWPWQASLQLIGSGHQCGASLISNTWLLTAAHCFWKNKDPTQWIATFGATITPPAVKRNV | (SEQ ID NO:6) |
| RKIILHENYHRETNENDIALVQLSTGVEFSNIVQRVYLPDSSIKLPPKTSVFVTGFGSIVDDGPIQNTLRQA | |
| RVETISTDVCNRKDVYDGLITPGMLCAGFMEGKIDACKGDSGGPLVYDNHDIWYIVGIVSWGQSCALPKKPG | |
| VYTRVTKYRDWIASKTGMLE | |

[0058] NOV1d

[0059] A disclosed NOV1 d nucleic acid of 708 nucleotides (also referred to as 168446547) encoding a novel Airway Trypsin-Like Protease-like protein is shown in Table 1H. An open reading frame was identified beginning with an AGA initiation codon at nucleotides 1-3 and ending at nucleotides 706-708. The start codon is in bold letters in Table 1H. Since the start codon of NOV1d is not a traditional initiation codon, and NOV1d has no termination codon, NOV1d could be a partial open reading frame that could be extended in the 5′ and/or 3′ direction(s).

TABLE 1H
NOV1d nucleotide sequence.

| | |
|---|---|
| AGATCTGTCCAAGGAAGGGAAACAGCTATGGAAGGGGAATGGCCATGGCAGGCCAGCCTCCAGCTCATAGGG | (SEQ ID NO:7) |
| TCACGCCATCAGTGTGGAGCCAGCCTCATCAGTAACACATGGCTGCTCACAGCAGCTCACTGCTTTTGGAAA | |
| AATAAAGACCCAACTCAATGGATTGCTACTTTTGGTGCAACTATAACACCACCCGCAGTGAAACGAAATGTG | |
| AGGAAAATTATTCTTCATGAGAATTACCATAGAGAAACAAATGAAAATGACATTGCTTTGGTTCAGCTCTCT | |
| ACTGGAGTTGAGTTTTCAAATATAGTCCAGAGAGTTTGCCTCCCAGACTCATCTATAAAGTTGCCACCTAAA | |
| ACAAGTGTGCTCGTCACAGGATTTGGATCCATTGTAGATGATGGACCTATACAAAATACACTTCGGCAAGCC | |
| AGAGTGGAAACCATAAGCACTGATGTGTGTAACAGAAAGGATGTGTATGATGGCCTGATAACTCCAGGAATG | |
| TTATGTGCTGGATTCATGGAAGGAAAAATAGATGCATGTAAGGGAGATTCTGGTGGACCTCTGGTTTATGAT | |
| AATCATGACATCTCGTACATTGTAGGTATAGTAAGTTGCGGACAATCATGTGCACTTCCCAAAAAACCTGGA | |
| GTCTACACCAGAGTAACTAAGTATCGAGATTGGATTGCCTCAAAGACTGGTATGCTCGAG | |

[0060] The disclosed NOV1d polypeptide (SEQ ID NO: 8) encoded by SEQ ID NO: 7 has 236 amino acid residues and is presented in Table 1I using the one-letter amino acid code.

TABLE 1I
Encoded NOV1d protein seqnence.

| | |
|---|---|
| RSVQGRETANEGEWPWQASLQLIGSCHQCGASLISNTWLLTAAHCFWKNKDPTQWIATFGATITPPAVKRNV | (SEQ ID NO:8) |
| RKIILHENYNRETNENDIALVQLSTGVEFSNIVQRVCLPDSSIKLPPKTSVLVTGFGSIVDDGPIQNTLRQA | |
| RVETISTDVONRKDVYDGLITPGMLCAGFMEGKIDACKGDSGGPLVYDNHDIWYIVOIVSWGQSCALPKKPG | |
| VYTRVTKYRDWIASKTGMLE | |

[0061] Homologies to either of the above NOV1 proteins will be shared by the other NOV1 protein insofar as they are homologous to each other as shown below. Any reference to NOV1 is assumed to refer to all three of the NOV1 proteins in general, unless otherwise noted.

[0062] The disclosed NOV1a polypeptide has homology to the amino acid sequences shown in the BLASTP data listed in Table 1J.

TABLE 1J
BLAST results for NOV1a

| Gene Index/ | | Length | Identity | Positives | |
|---|---|---|---|---|---|
| Identifier | Protein/ Organism | (aa) | (%) | (%) | Expect |
| gi\|17446381\|ref\|XP_{—} | similar to DESC1 | 246 | 200/247 | 214/247 | e−109 |
| 068225.1\| | protein (H. sapiens) | | (80%) | (85%) | |
| (XM_068225) | [Homo sapiens] | | | | |
| gi\|4758508\|ref\|NP_{—} | airway trypsin- | 418 | 180/390 | 251/390 | 4e−94 |
| 004253.1\| | like protease | | (46%) | (64%) | |
| (NM_004262) | [Homo sapiens] | | | | |
| gi\|17437609\|ref\|XP_{—} | similar to DESC1 protein | 345 | 160/346 | 214/346 | 1e−82 |
| 003340.5\| | (H. sapiens) | | (46%) | (61%) | |
| (XM_003340) | [Homo sapiens] | | | | |
| gi\|7661558\|ref\|NP_{—} | DESC1 protein | 422 | 160/346 | 214/346 | 1e−82 |
| 054777.1\| | [Homo sapiens | | (46%) | (61%) | |
| (NM_014058) | | | | | |
| gi\|17446387\|ref\|XP_{—} | similar to airway | 406 | 139/269 | 179/269 | 6e−75 |
| 068227.1\| | trypsin-like | | (51%) | (65%) | |
| (XM_068227) | protease (H. sapiens) | | | | |

[0063] The homology between these and other sequences is shown graphically in the ClustalW analysis shown in Table 1K. In the ClustalW alignment of the NOV1 proteins, as well as all other ClustalW analyses herein, the black outlined amino acid residues indicate regions of conserved sequence (i.e., regions that may be required to preserve structural or functional properties), whereas non-highlighted amino acid residues are less conserved and can potentially be altered to a much broader extent without altering protein structure or function.

[image]

[image]

[0064] The presence of identifiable domains in NOV1, as well as all other NOVX proteins, was determined by searches using software algorithms such as PROSITE, DOMAIN, Blocks, Pfam, ProDomain, and Prints, and then determining the Interpro number by crossing the domain match (or numbers) using the Interpro website (http:www.ebi.ac.uk/ interpro). DOMAIN results for NOV1 as disclosed in Tables 1L-1M, were collected from the Conserved Domain Database (CDD) with Reverse Position Specific BLAST analyses. This BLAST analysis software samples domains found in the Smart and Pfam collections. For Table 1K and all successive DOMAIN sequence alignments, fully conserved single residues are indicated by black shading or by the sign (|) and “strong” semi-conserved residues are indicated by grey shading or by the sign (+). The “strong” group of conserved amino acid residues may be any one of the following groups of amino acids: STA, NEQK, NHQK, NDEQ, QHRK, MILV, MILF, HY, FYW.

[0065] Tables 1L-M list the domain descriptions from DOMAIN analysis results against NOV1a. This indicates that the NOV1a sequence has properties similar to those of other proteins known to contain this domain.

TABLE 1L
Domain Analysis of NOV1a

gnl|Smart|smart00020, Tryp_SPc, Trypsin-like serine protease; Many of
these are synthesised as inactive precursor zymogens that are cleaved
during limited proteolysis to generate their active forms .A few,
however, are active as single chain molecules, and others are inactive
due to substitutions of the catalytic triad residues. (SEQ ID NO:66)
CD-Length = 230 residues, 100.0% aligned
Score = 262 bits (669), Expect = 3e − 71

| | | | |
|---|---|---|---|
| Query: | 187 | RIVQGRETAMEGEWPWQASLQLIGSGHQCGASLISNTWLLTAAHCFWKNKDPTQWIATFG | 246 |
| | | \|\|\| \| \| + \| +\|\|\| \|\|\| \| \| \|\| \|\|\|\| \|+\|\|\|\|\|\| + \|+ \| | |
| Sbjct: | 1 | RIVGGSEANI-GSFPWQVSLQYRGGRHFCGGSLISPRWVLTAAHCVY-GSAPSSIRVRLG | 58 |
| Query: | 247 | AT---ITPPAVVRKIILHYRETNENDIALVQLSTGVEPSNIVQRVCLPDSSIKJL | 303 |
| | | + \| \|+\|+\| \|\|+ \| +\|\|\|\|\|++\|\| \| ‘\|+ \|+ +\|\|\| \| + | |
| Sbjct: | 59 | SHDLSSGEETQTVKVSKVIVHPNYNPSTYDNDIALLKLSEPVTLSDTVRPICLPSSGYNV | 118 |
| Query: | 304 | PPKTSVFVTGFGSI-VDDGPIQNTLRQARVETISTDVCNRKDVYDGLITPGMLCAGFMEG | 362 |
| | | \| \|+ \|+\|+\| \| + +\|\|++ \| +\| \| \| \|\| \|\|\|\|\| +\|\| | |
| Sbjct: | 119 | PAGTTCTVSGWGRTSESSGSLPDTLQEVNVPIVSNATCRRAYSGGPAITDNMLCAGGLET | 178 |
| Query: | 363 | KIDACKGDSGGPLVYDNHDIWYIVGIVSWG-QSCALPKKPGVYTRVTKYRDWI | 414 |
| | | \|\|\|+\|\|\|\|\|\|\|\| ++ \| +\|\|\|\|\|\|\| \|\| \| \|\|\|\|\|\|\|\|+ \| \|\|\| | |
| Sbjct: | 179 | GKDACQGDSGGPLVCNDP-RWVLVGIVSWGSYGCARPNKPGVYTRVSSYLDWI | 230 |

[0066] TABLE 1M
Domain Analysis of NOV1a

gn1|Pfam|pfam00089, trypsin, Trypsin. Proteins recognized include all
proteins in families S1, S2A, S2B, S2C, and S5 in the classification
of peptidases. Also included are proteins that are clearly members,
but that lack peptidase activity, such as haptoglobin and protein z
(PRTZ*). (SEQ ID NO:67)
CD-Length = 217 residues, 100.0% aligned
Score = 204 bits (518), Expect = 1e − 53

| | | | |
|---|---|---|---|
| Query: | 188 | IVQGRETAMEGEWPWQASLQLIGSGHQCGASLISNTWLLTAAHCFWKNKDPTQWIATFGA | 247 |
| | | \|\| \|\|\| \| +\|\|\| \|\|\| + \|\|\| \|\| \|\|\|\| \|+\|\|\|\|\|\| + | |
| Sbjct: | 1 | IVGGREAQA-GSFPWQVSLQ-VSSGHFCGGSLISENWVLTAAHCVSGASSVRVVLGEHNL | 58 |
| Query: | 248 | TITPPAV-KRNVRKIILHENYHRETNENDIALVQLSTGVEFSNIVQRVCLPDSSIKLPPK 306 | |
| | | \| \| +\|+\|\|\|+\| \|\|+ +\|\| \|\|\|\|++\| + \| + \|+ +\|\|\| +\| \|\| | |
| Sbjct: | 59 | GTTEGTEQKFDVKKIIVHPNYNPDTN--DIALLKLKSPVTLGDTVRPICLPSASSDLPVG | 116 |
| Query: | 307 | TSVFVTGFGSIVDDGPIQNTLRQARVETISTDVCNRKDVYDGLITPGMLCAGFMEGKIDA | 366 |
| | | \|+ \|+\|+\| + \| \|\|++ \| +\| + \| \| \| +\| \|+\|\|\| + \|\| \|\| | |
| Sbjct: | 117 | TTCSVSGWGRTKNLGTSD-TLQEVVVPIVSRETCRS--AYGGTVTDTMICAGALGGK-DA | 172 |
| Query: | 367 | CKGDSGGPLVYDNHDIWYIVGIVSWGQSCALPKKPGVYTRVTKYRDWI | 414 |
| | | \|+\|\|\|\|\|\|\|\|\| + +\|\|\|\|\|\|\| \|\|+ \|\|\|\|\|\|\|++\| \|\|\| | |
| Sbjct: | 173 | CQGDSGGPLVCSDG---ELVGIVSWGYGCAVGNYPOVYTRVSRYLDWI | 217 |

[0067] Human airway trypsin-like protease (HAT) from human sputum is related to the prevention of fibrin deposition in the airway lumen by cleaving fibrinogen. In mucoid sputum samples from patients with chronic airway diseases, the concentration of fibrinogen, as measured by ELISA, was in the range of 2-20 micrograms/ml, and trypsin-like activity, as measured by spectrofluorometry was in the range of 10-50 milliunits (mU)/ml. The trypsin-like activity of mucoid sputum was mainly due to HAT. As shown by SDS-polyacrylamide gel electrophoresis, HAT cleaved fibrinogen, especially its alpha-chain, regardless of the concentration of fibrinogen. Pretreatment of fibrinogen with HAT resulted in a decrease or complete loss of its thrombin-induced clotting capacity, depending on the duration of pretreatment with HAT and the concentration of HAT. HAT may participate in the anticoagulation process within the airway, especially at the level of the mucous membrane, by cleaving fibrinogen transported from the blood stream. PMID: 9864967, UI: 99082486

[0068] A novel trypsin-like protease has been purified to homogeneity from the sputum of patients with chronic airway diseases, by sequential chromatographic procedures. The enzyme migrated on SDS-polyacrylamide gel electrophoresis to a position corresponding to a molecular weight of 28 kDa under both reducing and non-reducing conditions, and showed an apparent molecular weight of 27 kDa by gel filtration, indicating that it exists as a monomer. It had an NH2-terminal sequence of Ile-Leu-Gly-Gly-Thr-Glu-Ala-Glu-Glu-Gly-Ser-Trp-Pro-Trp-Gln-Val-Ser-Leu-Arg-Leu, which differed from that of any known protease. Studies with model peptide substrates showed that the enzyme preferentially cleaves the COOH-terminal side of arginine residues at the P1 position of certain peptides, cleaving Boc-Phe-Ser-Arg4-methylcoumaryl-7-amide most efficiently and having an optimum pH of 8.6 with this substrate. The enzyme was strongly inhibited by diisopropyl fluorophosphate, leupeptin, antipain, aprotinin, and soybean trypsin inhibitor, but hardly inhibited by secretory leukocyte protease inhibitor at 10 microM. An immunohistochemical study indicated that the enzyme is located in the cells of the submucosal serous glands of the bronchi and trachea. These results suggest that the enzyme is secreted from submucosal serous glands onto the mucous membrane in patients with chronic airway diseases. PMID: 9070615, UI: 97224034

[0069] A novel trypsin-like protease associated with rat bronchiolar epithelial Clara cells, named Tryptase Clara, has been purified to homogeneity from rat lung by a series of standard chromatographic procedures. The enzyme has apparent molecular masses of 180+/−16 kDa on gel filtration and 30+/−1.5 kDa on sodium dodecyl sulfate-polyacrylamide gel electrophoresis under reducing conditions. Its isoelectric point is pH 4.75. Studies with model peptide substrates showed that the enzyme preferentially recognizes a single arginine cleavage site, cleaving Boc-Gln-Ala-Arg4-methylcoumaryl-7-amide most efficiently and having a pH optimum of 7.5 with this substrate. The enzyme is strongly inhibited by aprotinin, diisopropylfluorophosphate, antipain, leupeptin, and Kunitz-type soybean trypsin inhibitor, but inhibited only slightly by Bowman-Birk soybean trypsin inhibitor, benzamidine, and alpha 1-antitrypsin. Immunohistochemical studies indicated that the enzyme is located exclusively in the bronchiolar epithelial Clara cells and colocalized with surfactant. An immunoreactive protein with a molecular mass of 28.5 kDa was also detected in airway secretions by Western blotting analyses, suggesting that the 30-kDa protease in Clara cells is processed before or after its secretion. Proteolytic cleavage of the hemagglutinin of influenza virus is a prerequisite for the virus to become infectious. Tryptase Clara was shown to cleave the hemagglutinin and activate infectivity of influenza A virus in a dose-dependent way. These results suggest that the enzyme is a possible activator of inactive viral fusion glycoprotein in the respiratory tract and thus responsible for pneumopathogenicity of the virus. PMID: 1618859, UI: 92317085

[0070] The disclosed NOV1 nucleic acid of the invention encoding a Airway Trypsin-Like Protease-like protein includes the nucleic acid whose sequence is provided in Table 1A, 1C, 1E, 1G or a fragment thereof. The invention also includes a mutant or variant nucleic acid any of whose bases may be changed from the corresponding base shown in Table 1A, 1C, 1E, or 1G while still encoding a protein that maintains its Airway Trypsin-Like Protease-like activities and physiological functions, or a fragment of such a nucleic acid. The invention further includes nucleic acids whose sequences are complementary to those just described, including nucleic acid fragments that are complementary to any of the nucleic acids just described. The invention additionally includes nucleic acids or nucleic acid fragments, or complements thereto, whose structures include chemical modifications. Such modifications include, by way of nonlimiting example, modified bases, and nucleic acids whose sugar phosphate backbones are modified or derivatized. These modifications are carried out at least in part to enhance the chemical stability of the modified nucleic acid, such that they may be used, for example, as antisense binding nucleic acids in therapeutic applications in a subject. In the mutant or variant nucleic acids, and their complements, up to about 31% percent of the bases may be so changed.

[0071] The disclosed NOV1 protein of the invention includes the Airway Trypsin-Like Protease-like protein whose sequence is provided in Table 1B, 1D, 1F, or 1H. The invention also includes a mutant or variant protein any of whose residues may be changed from the corresponding residue shown in Table 1B, 1D, 1F, or 1H while still encoding a protein that maintains its Airway Trypsin-Like Protease-like activities and physiological functions, or a functional fragment thereof. In the mutant or variant protein, up to about 54% percent of the residues may be so changed.

[0072] The invention further encompasses antibodies and antibody fragments, such as F_{ab} or (F_{ab})₂, that bind immunospecifically to any of the proteins of the invention.

[0073] The above defined information for this invention suggests that this Airway Trypsin-Like Protease-like protein (NOV1) may function as a member of a “Airway Trypsin-Like Protease family”. Therefore, the NOV1 nucleic acids and proteins identified here may be useful in potential therapeutic applications implicated in (but not limited to) various pathologies and disorders as indicated below. The potential therapeutic applications for this invention include, but are not limited to: protein therapeutic, small molecule drug target, antibody target (therapeutic, diagnostic, drug targeting/cytotoxic antibody), diagnostic and/or prognostic marker, gene therapy (gene delivery/gene ablation), research tools, tissue regeneration in vivo and in vitro of all tissues and cell types composing (but not limited to) those defined here.

[0074] The NOV1 nucleic acids and proteins of the invention are useful in potential therapeutic applications implicated in cancer including but not limited to various pathologies and disorders as indicated below. For example, a cDNA encoding the Airway Trypsin-Like Protease-like protein (NOV1) may be useful in gene therapy, and the Airway Trypsin-Like Protease-like protein (NOV1) may be useful when administered to a subject in need thereof.

[0075] By way of nonlimiting example, the compositions of the present invention will have efficacy for treatment of patients suffering from chronic airway diseases such as asthma and cystic fibrosis, allergies, emphysema, bronchitis, lung cancer, or other pathologies or conditions. The NOV1 nucleic acid encoding the Airway Trypsin-Like Protease-like protein of the invention, or fragments thereof, may further be useful in diagnostic applications, wherein the presence or amount of the nucleic acid or the protein are to be assessed.

[0076] NOV1 nucleic acids and polypeptides are further useful in the generation of antibodies that bind immuno-specifically to the novel NOV1 substances for use in therapeutic or diagnostic methods. These antibodies may be generated according to methods known in the art, using prediction from hydrophobicity charts, as described in the “Anti-NOVX Antibodies” section below. The disclosed NOV1 proteins have multiple hydrophilic regions, each of which can be used as an immunogen. In one embodiment, a contemplated NOV1 epitope is from about amino acids 40 to 225. In another embodiment, a NOV1 epitope is from about amino acids 240 to 270. In other embodiments, a NOV1 epitope is from about amino acids 320 to 340, from about amino acids 360 to 370, and from about amino acids 390 to 410. These novel proteins can be used in assay systems for functional analysis of various human disorders, which will help in understanding of pathology of the disease and development of new drug targets for various disorders.

[0077] NOV2

[0078] A disclosed NOV2 nucleic acid of 1476 nucleotides (also referred to as CG55782-01) encoding a novel P450-like protein is shown in Table 2A. An open reading frame was identified beginning with an ATG initiation codon at nucleotides 1-3 and ending with a TAA codon at nucleotides 1474-1476. A The start and stop codons are in bold letters in Table 2A.

TABLE 2A
NOV2 nucleotide sequence (SEQ ID NO:9).

ATGGACAGCATTAAGCACAGCCATCTTACTCCTGCTCCTGGCTCTCGTCTGTCTGTCCTGACCCTAAGCTCA
AGAGATAAGGGAAAGCTGCCTCCGGGACCCAGACCCCTCTCAATCCTGGGAAACCTGCTGCTGCTTTGCTCC
CAAGACATGCTGACTTCTCTCACTAAGCTGAGCAAGGAGTATGGCTCCATGTACACAGTGCACCTGGGACCC
AGGCGGGTGGTGGTCCTCAGCGGGTACCAAGCTGTGAAGGAGGCCCTGGTGGACCAGGGAGAGGAGTTTAGT
GGCCGCGGTGACTACCCTGCCTTTTTCAACTTTACCAAGGGCAATGGCATCGCCTTCTCCAGTGGGGATCGA
TGGAAGGTCCTGAGACAGTTCTCTATCCAGATTCTACGGAATTTCGGGATGGGGAAGAGAAGCATTGAGGAG
CGAATCCTAGAGGAGGGCAGCTTCCTGCTGGCGGAGCTGCGGAAAACTGAAGGCGAGCCCTTTGACCCCACG
TTTGTGCTGAGTCGCTCAGTGTCCAACATTATCTGTTCCGTGCTCTCGGCAGCCGCTTTCGACTATGATGAT
GAGCGTCTGCTCACCATTATCCGCCTTATCAATGACAACTTCCAAATCATGAGCAGCCCCTGGGGCGAGTTG
TACGACATCTTCCCGAGCCTCCTGGACTGGGTGCCTGGGCCGCACCAACGCATCTTCCAGAACTTCAAGTGC
CTGAGAGACCTCATCGCCCACAGCGTCCACGACCACCAGGCCTCGCTAGACCCCAGATCTCCCCGGGACTTC
ATCCAGTGCTTCCTCACCAAGATGGCAGAGGAGAAGGAGGACCCACTGAGCCACTTCCACATGGATACCCTG
CTGATGACCACACATAACCTGCTCTTTGGCGGCACCAAGACGGTGAGCACCACGCTGCACCACGCCTTCCTG
GCACTCATGAAGTACCCAAAAGTTCAAGCCCGCGTGCAGGAGGAGATCGACCTCGTGGTGGGACGCGCGCGG
CTGCCGGCGCTGAAGGAACCGCGCGGCCATGCCTTACACAGACGCGGTGATCCACGAGGTGCACGCTTTGCA
GACATCATCCCCATGAACTTGCCGCACCGCGTCACTAGGGACACGGCCTTTCGCGGCTTCCTGATACCCAGG
GGCACCGATGTCATCACCCTCCTTAACACCGTCCACTACGACCCCAGCCAGTTCCTGACGCCCCAGGAGTTC
AACCCCGAGCATTTTTTGGATGCCAATCAGTCCTTCAAGAAGAGTCCAGCCTTCATGCCCTTCTCAGCTGGG
CGCCGTCTGTGCCTGGGAGAGTCGCTGGCGCGCATGGAGCTCTTTCTGTACCTCACCGCCATCCTGCAGAGC
TTTTCGCTGCAGCCGCTGGGTGCGCCCGAGGACATCGACCTGACCCCACTCAGCTCAGGTCTTGGCAATTTG
CCGCGGCCTTTCCAGCTGTGCCTGCGCCCGCGCTAA

[0079] The disclosed NOV2 nucleic acid sequence, localized to chromsome 19, has 1419 of 1476 bases (96%) identical to a gb:GENBANK-ID:HUMCYPIIF|acc:J02906.1 mRNA from Homo sapiens (Human cytochrome P450IIF1 protein (CYP2F) mRNA, complete cds) (E=7.5e⁻³⁰¹).

[0080] A NOV2 polypeptide (SEQ ID NO: 10) encoded by SEQ ID NO: 9 has 492 amino acid residues and is presented using the one-letter code in Table 2B. Signal P, Psort and/or Hydropathy results predict that NOV2 contains a signal peptide and is likely to be localized to the endoplasmic reticulum (membrane) with a certainty of 0.8200. In other embodiments, NOV2 may also be localized to the microbody (peroxisome) with a certainty of 0.2824, the plasma membrane with a certainty of 0.1900, or the endoplasmic reticulum (lumen) with a certainty of 0.1000. The most likely cleavage site for NOV2 is between positions 24 and 25: LSS-RD.

TABLE 2B
Encoded NOV2 protein sequence (SEQ ID NO:10).

MDSISTAILLLLLALVCLLLTLSSRDKGKLPPGPRPLSILGNLLLLCSQDMLTSLTKLSKEYGSMYTVHLGP
RRVVVLSGYQAVKEALVDQGEEFSGTGDYPAFFNFTKGNGIAFSSGDRWKVLRQFSIQILRNFGMGKRSIEE
RILEEGSFLLAELRKTEGEPFDPTFVLSRSVSNIICSVLFGSRFDYDDERLLTIIRLINDNFQIMSSPWGEL
YDIFPSLLDWVPGPHQRIFQNFKCLRDLIARSVHDHQASLDPRSPRDFIQCFLTKMAEEKEDPLSHFHMDTL
LMTTHNLLFGGTKTVSTTLRHAFLAMKYPKVQARVQEEIDLVVGRARLPALKDRAAMPYTDAVIHEVQRFAI
DIIPMNLPHRVTRDTAFRGFLIPKGTDVITLLNTVHYDPSQFLTPQEFNPEHFLDANQSFKKSPAFMPFSAG
RRLCLGESLARMELFLYLTAILQSFSLQPLGAPEDIDLTPLSSGLGNLPRPFQLCLRPRX

[0081] The disclosed NOV2 amino acid sequence has 484 of 491 amino acid residues (98%) identical to, and 486 of 491 amino acid residues (98%) similar to, the 491 amino acid residue ptnr:SWISSPROT-ACC:P24903 protein from Homo sapiens (Human) (Cytochrome P450 2F1 (EC 1.14.14.1) (CYPIIF1)) (E=1.1e⁻²⁵⁷).

[0082] NOV2 is expressed in at least lung. This information was derived by determining the tissue sources of the sequences that were included in the invention including but not limited to SeqCalling sources, Public EST sources, Literature sources, and/or RACE sources.

[0083] NOV2 also has homology to the amino acid sequences shown in the BLASTP data listed in Table 2C.

TABLE 2C
BLAST results for NOV2

| Gene Index/ | Protein/ | Length | Identity | Positives | |
|---|---|---|---|---|---|
| Identifier | Organism | (aa) | (%) | (%) | Expect |
| gi\|14786875\|ref\|XP_{—} | cytochrome | 495 | 460/495 | 460/495 | 0.0 |
| 012782.4\| | P450, | | (92%) | (92%) | |
| (XM_012782) | subfamily | | | | |
| | IIF, | | | | |
| | polypeptide 1 | | | | |
| | [Homo sapiens | | | | |
| gi\|4503225\|ref\|NP_{—} | cytochrome | 491 | 460/495 | 462/495 | 0.0 |
| 000765.1\| | P450, | | (92%) | (92%) | |
| (NM_000774) | subfamily | | | | |
| | IIF, | | | | |
| | polypeptide 1; | | | | |
| | microsomal | | | | |
| | monooxygenase; | | | | |
| | xenobiotic | | | | |
| | monooxygenase; | | | | |
| | flavoprotein- | | | | |
| | linked | | | | |
| | monooxygenase | | | | |
| | [Homo sapiens] | | | | |
| gi\|5915805\|sp\|O18809 | CYTOCHROME | 491 | 397/491 | 438/491 | 0.0 |
| \|C2F3_CAPHI | P450 2F3 | | (80%) | (88%) | |
| | (CYPIIF3 | | | | |
| gi\|9506531\|ref\|NP_{—} | Cytochrome | 491 | 391/491 | 431/491 | 0.0 |
| 062176.1\| | P450, | | (79%) | (87%) | |
| (NM_019303) | subfamily | | | | |
| | IIF, | | | | |
| | polypeptide 1 | | | | |
| | [Rattus norvegicus] | | | | |
| gi\|461829\|sp\|P33267\| | CYTOCHROME | 491 | 385/491 | 427/491 | 0.0 |
| C2F2_MOUSE | P450 2F2 | | (78%) | (86%) | |
| | (CYPIIF2) | | | | |
| | (NAPHTHALENE | | | | |
| | DEHYDROGENASE) | | | | |
| | (NAPHTHALENE | | | | |
| | HYDROXYLASE) | | | | |
| | (P450-NAH-2) | | | | |

[0084] The homology of these sequences is shown graphically in the ClustalW analysis shown in Table 2D.

[image]

[image]

[image]

[0085] Table 2E lists the domain description from DOMAIN-analysis results against NOV2. This indicates that the NOV2 sequence has properties similar to those of other proteins known to contain this domain.

TABLE 2E
Domain Analysis of NOV2

gn1|Pfam|pfam00067, p450, Cytochrome P450. Cytochrome P450s are
involved in the oxidative degradation of various compounds.
Particularly well known for their role in the degradation of
environmental toxins and mutagens. Structure is mostly alpha, and
hinds a heme cofactor. (SEQ ID NO:73)
CD-Length = 445 residues, 100.0% aligned
Score = 453 bits (1165) , Expect =1e − 128

| | | | |
|---|---|---|---|
| Query: | 31 | PPGPRPLSILGNLLLLCSQDMLTSLTKLSKEYGSMYTVHLGPRRVVVLSGYQAVKEALVD | 90 |
| | | \|\|\|\| \|\| ++\|\|\|\| \| + \|\|\|+\| \|+\|\| ++\|++\|\|\|\| \|\|\|++\| +\|\|\|\| \|+\| | |
| Sbjct: | 1 | PPGPPPLPLIGNLLQLGRCPIH-SLTELRKKYGPVFTLYLGPRPVVVVTGPEAVKEVLID | 59 |
| Query: | 91 | QGEEFSGRGDYPAFFNFThGNGIAFSSGDRWKVLRQFSIQILRNFGMGKRS-IEERILEE | 149 |
| | | +\|\|\|\|+\|\|\|\|+\| \| \| \|\| \|\|+\| \|\|+ \|\|+ + \|\| \|\|\|\|\|\|\| +\|\|\|\| \|\| | |
| Sbjct: | 60 | KGEEFAGRGDFPVFPWL--GYGILFSNGPRWRQLRR--LLTLRFFGMGKRSKLEERIQEE | 115 |
| Query: | 150 | GSFLLAELRKTEGEPFDPTFVLSRSVSNIICSVLFGSRFDYDDERLLTIIRLINDNFQIM | 209 |
| | | \|+ \|\|\| +\| \| \| \| +\|+ + \|+\|\|\|+\|\|\| \|\|\|\|+\| \| +\| +\|+ \| ++ | |
| Sbjct: | 116 | ARDLVERLRKEQGSPIDITELLAPAPLNVICSLLFGVRFDYEDPEFLKLIDKLNELFFLV | 175 |
| Query: | 210 | SSPWGELYDIFPSLLDWVPGPHQRIFQNFKCLRDLIAHSVHDHQASLDPRSPRDFIQCFL | 269 |
| | | \| \|\|\|+\| \| \| ++\|\| \|++ \|+ \| \|+\| + + + + +\|+\| \|\|\|\|+ \| | |
| Sbjct: | 176 | S-PWGQLLDFFR----YLPGSHRKAFKAAKDLKDYLDKLIEERRETLEPGDPRDFLDSLL | 230 |
| Query: | 270 | TKMAEEKEDPLSHFHMDTLLMTTENLLFCGTKTVSTTLHHAFLALMKYPKVQARVQEEID | 329 |
| | | + \| \| + \| \| +\|\|\| \|\| \| \|+\|\| \| \| \|+\|+\|\|\|+++\|\|\|\| | |
| Sbjct: | 231 | IEAKREGG---SELTDEELKATVLDLLFAGTDTTSSTLSWALYLLAKHPEVQAKLREEID | 287 |
| Query: | 330 | LVVGRARLPALKDRAAMPYTDAVIHEVQRFADIIPMNLPHRVTRDTAFRGFLIPKGTDVI | 389 |
| | | \|+51 \| \| \| \|\|\| \|\|\| \|\|\|\| \| \| ++\|+ \|\| \| \|\| \|+\|\|\|\|\|\| \|\| | |
| Sbjct: | 288 | EVIGRDRSPTYDDRANNPYLDAVIKETLRLHPVVPLLLPRVATEDTEIDGYLIPKGTLVI | 347 |
| Query: | 390 | TLLNTVHYDPSQFLTPQEFNPEHFLDANQSFKKSPAFMPFSAGRRLCLGESLARMELFLY | 449 |
| | | \| ++\| \|\| \| \|+\|\|+\|\| \|\|\| \| \|\|\|\| \|\|+\|\| \|\| \| \|\|\|\| \|\|\|\|\|\|\|\|+ | |
| Sbjct: | 348 | VNLYSLHRDPKVFPNPEEFDPERFLDENGKFKKSYAFLPFGAGPRNCLGERLARMELFLF | 407 |
| Query: | 450 | LTAILQSFSLQPLGAPEDIDLTPLSSGLGNLPRPFQLCL | 488 |
| | | \| +\|\| \| \|+ + \| \|\| \|\|\| \|\| + \| +\|\| | |
| Sbjct: | 408 | LATLLQRFELELVP-PGDIPLTPKPLGLPSKPPLYQLRA | 445 |

[0086] The P450 gene superfamily is a biologically diverse class of oxidase enzymes; members of the class are found in all organisms. P450 proteins are clinically and toxicologically important in humans; they are the principal enzymes in the metabolism of drugs and xenobiotic compounds, as well as in the synthesis of cholesterol, steroids and other lipids. Induction of some P450 genes can also be a risk factor for several types of cancer. This diversity of function is mirrored in the diversity of nucleotide and protein sequences; there are currently over 100 human P450 forms described. Allelic forms of many cytochrome P450 genes have been identified as causing quantitatively different rates of drug metabolism, and hence are important to consider in the development of safe and effective human pharmaceutical therapies. [reviewed in E. Tanaka, J Clinical Pharmacy & Therapeutics 24:323-329, 1999].

[0087] The disclosed NOV2 nucleic acid of the invention encoding a P450-like protein includes the nucleic acid whose sequence is provided in Table 2A or a fragment thereof. The invention also includes a mutant or variant nucleic acid any of whose bases may be changed from the corresponding base shown in Table 2A while still encoding a protein that maintains its P450-like activities and physiological functions, or a fragment of such a nucleic acid. The invention further includes nucleic acids whose sequences are complementary to those just described, including nucleic acid fragments that are complementary to any of the nucleic acids just described. The invention additionally includes nucleic acids or nucleic acid fragments, or complements thereto, whose structures include chemical modifications. Such modifications include, by way of nonlimiting example, modified bases, and nucleic acids whose sugar phosphate backbones are modified or derivatized. These modifications are carried out at least in part to enhance the chemical stability of the modified nucleic acid, such that they may be used, for example, as antisense binding nucleic acids in therapeutic applications in a subject. In the mutant or variant nucleic acids, and their complements, up to about 4% percent of the bases may be so changed.

[0088] The disclosed NOV2 protein of the invention includes the P450-like protein whose sequence is provided in Table 2B. The invention also includes a mutant or variant protein any of whose residues may be changed from the corresponding residue shown in Table 2B while still encoding a protein that maintains its P450-like activities and physiological functions, or a functional fragment thereof. In the mutant or variant protein, up to about 22% percent of the residues may be so changed.

[0089] The NOV2 nucleic acids and proteins of the invention are useful in potential therapeutic applications implicated in various pathologies and disorders.

[0090] NOV2 nucleic acids and polypeptides are further useful in the generation of antibodies that bind immunospecifically to the novel substances of the invention for use in therapeutic or diagnostic methods. These antibodies may be generated according to methods known in the art, using prediction from hydrophobicity charts, as described in the “Anti-NOVX Antibodies” section below. The disclosed NOV2 protein has multiple hydrophilic regions, each of which can be used as an immunogen. In one embodiment, a contemplated NOV2 epitope is from about amino acids 75 to 160. In another embodiment, a NOV2 epitope is from about amino acids 170 to 270. In additional embodiments, and from about amino acids 400 to 430. These novel proteins can be used in assay systems for functional analysis of various human disorders, which are useful in understanding of pathology of the disease and development of new drug targets for various disorders.

[0091] NOV3

[0092] NOV3 includes three novel Apolipoprotein A-I precursor-like proteins disclosed below. The disclosed sequences have been named NOV3a and NOV3b.

[0093] NOV3a

[0094] A disclosed NOV3a nucleic acid of 818 nucleotides (also referred to as CG557,71-01) encoding a novel Apolipoprotein A-I precursor-like protein is shown in Table 3A. An open reading frame was identified beginning with a ATG initiation codon at nucleotides 36-38 and ending with a TAA codon at nucleotides 756-758. The start and stop codons are in bold letters, and the 5′ and 3′ untranslated regions are underlined.

TABLE 3A
NOV3a Nucleotide Sequence (SEQ ID NO:11)

TGGCTGAAGGCGGAGGTCCCCACGGCCCTTCAGGATGAAAGCTGCGGTGCTGACCTTGGCCGTGCTCATTC
CTGACGGGGAGCCAGGCTCGGCATTTCTGGCAGCAAGATGAACCCCCCAGAGCCCCTGGGATCGAGTAGAA
GGACCTGGCCACTGTGTACGTGGATGTGCTCAAAGACAGCGTGACCTCCACCTTCAGCAAGCTGCGCGAAC
AGCTCGGCCCTGTGACCCAGGAGTTCTGGGATAACCTGGAAAAGGAGACAGAGGGCCTGAGGCAGGAGATG
AGCAAGGATCTGGAGGAGGTGAAGGCCAAGGTGCAGCCCTACCTGGACGACTTCCAGAAGAAGTGGCAGGA
GGAGATGGAGCTCTACCGCCAGAAGGTGGAGCCGCTGCGCGCAGAGCTCCAAGAGGGCGCGCGCCAGAAGC
TGCACGAGCTGCAAGAGAAGCTGAGCCCACTGGGCGAGGAGATGCGCGACCGCGCGCGCGCCCATGTGGAC
GCGCTGCGCACGCATCTGGCCCCTGACAGCGACGAGCTGCGCCAGCGCTTGGCCGCGCGCCTTGAGGCTCT
CAAGGAGAACGGCGGCGCCAGACTGGCCGAGTATCACGCCAAGGCCACCGAGCATCTGAGCACGCTCAGCG
AGAAGGCCAAGCCCGCGCTCGAGGACCTCCGCCAAGGCCTGCTGCCCGTGCTGGAGAGCTTCAAGGTCAGC
TTCCTCAGCGCTCTCGAGGAGTACACTAAGAAGCTCAACACCCAGTGAGGCGCCCGCGCCGCCCCCCTTCC
CGGTGCTCAGAATAAACGTTTCCAAAGTGGGAAAAAA

[0095] The disclosed NOV3a nucleic acid sequence maps to chromosome 11 and has 640 of 643 bases (99%) identical to a gb:GENBANK-ID:HSAPOAIB|acc:X02162.1 mRNA from Homo sapiens (Human mRNA for apolipoprotein AI (apo AI)) (E=9.5e⁻¹³⁸).

[0096] A disclosed NOV3a protein (SEQ ID NO: 12) encoded by SEQ ID NO: 11 has 240 amino acid residues, and is presented using the one-letter code in Table 3B. Signal P, Psort and/or Hydropathy results predict that NOV3a does have a signal peptide, and is likely to be localized to extracellularly with a certainty of 0.3700. In other embodiments NOV3a is also likely to be localized endoplasmic reticulum (membrane) with a certainty of 0.1000, to the endoplasmic reticulum (lumen) with a certainty of 0.1000, or to the microbody (peroxisome) with a certainty of 0.1000. The most likely cleavage site for NOV3a is between positions 18 and 19, (SQA-RH).

TABLE 3B
Encoded NOV3a protein sequence (SEQ ID NO:12).

MKAAVLTAVLFLTGSQARHFWQQDEPPQSPWDRVKDLATVYVDVLKDSVTSTFSKLREQLGPVTQEFWADN
LEKETEGLRQEMSKDLEEVKAKVQPYLDDFQKKWQEEMELYRQKVEPLRAELQEGARQKLHELQEKLASPL
EEMRDRARAHVDALRTHLAPYSDELRQRLAARLEALKENGGARLAEYHAKATEHLSTLSEKAKPALEDLRQ
GLLPVLESPKVSFLSALEEYTKKLNTQ

[0097] The disclosed NOV3a amino acid has 193 of 193 amino acid residues (100%) identical to, and 193 of 193 amino acid residues (100%) similar to, the 267 amino acid residue ptnr:SWISSPROT-ACC:P02647 protein from Homo sapiens (Human) (Apolipoprotein A-I Precursor (APO-Al)) (E=7.1e⁻⁹⁸).

[0098] NOV3 is expressed in at least Colon, Gall Bladder, Heart, Liver, Lung, Lymph node, Lymphoid tissue, Ovary, Placenta, Spleen, Testis, Thymus, and Whole Organism. This information was derived by determining the tissue sources of the sequences that were included in the invention including but not limited to SeqCalling sources, Public EST sources, Literature sources, and/or RACE sources.

[0099] NOV3b

[0100] In NOV3b, the target sequence identified previously, NOV3a, was subjected to the exon linking process to confirm the sequence. PCR primers were designed by starting at the most upstream sequence available, for the forward primer, and at the most downstream sequence available for the reverse primer. In each case, the sequence was examined, walking inward from the respective termini toward the coding sequence, until a suitable sequence that is either unique or highly selective was encountered, or, in the case of the reverse primer, until the stop codon was reached. Such primers were designed based on in silico predictions for the full length cDNA, part (one or more exons) of the DNA or protein sequence of the target sequence, or by translated homology of the predicted exons to closely related human sequences sequences from other species. These primers were then employed in PCR amplification based on the following pool of human cDNAs: adrenal gland, bone marrow, brain—amygdala, brain—cerebellum, brain—hippocampus, brain—substantia nigra, brain—thalamus, brain—whole, fetal brain, fetal kidney, fetal liver, fetal lung, heart, kidney, lymphoma—Raji, mammary gland, pancreas, pituitary gland, placenta, prostate, salivary gland, skeletal muscle, small intestine, spinal cord, spleen, stomach, testis, thyroid, trachea, uterus. Usually the resulting amplicons were gel purified, cloned and sequenced to high redundancy. The resulting sequences from all clones were assembled with themselves, with other fragments in CuraGen Corporation's database and with public ESTs. Fragments and ESTs were included as components for an assembly when the extent of their identity with another component of the assembly was at least 95% over 50 bp. In addition, sequence traces were evaluated manually and edited for corrections if appropriate. These procedures provide the sequence reported below, which is designated NOV3b. This differs from the previously identified sequence NOV3a in having 2 internal splice regions.

[0101] A disclosed NOV3b nucleic acid of 677 nucleotides (also referred to as Curagen Accession No. CG55771-02) encoding a novel Apolipoprotein A-1 Precursor-like protein is shown in Table 3C. An open reading frame was identified beginning with an ATG initiation codon at nucleotides 1-3 and ending with a TGA codon at nucleotides 634-636. A putative untranslated region downstream from the termination codon are underlined in Table 3C. The start and stop codons are in bold letters.

TABLE 3C
NOV3b nucleotide sequence (SEQ ID NO:13).

ATGAAAGCTGCGGTGCTGACCTTGGCCGTGCTCTTCCTGACGGGTGGGAGCCAGGCTCGGCATTTCTGGCAG
CAAGATGAACCCCCCCAGAGCCCCTGGGATCGAGTGAAGGACCTGGCCACTGTGTACGTCGATGTGCTCAAA
GACAGCGGCGACAGCGTGACCTCCACCTTCAGCAAGCTGCGCGAACAGCTCGGCCCTGTGACCCAGGAGTTC
TGGGATAACCTGGAAAAGGAGACAGAGGGCCTGAGGCAGGAGATGAGCAAGGATCTCGAGGACGTGAATGCC
AAGGTGCAGCCCTACCTGGACGACTTCCAGAAGAAGTGGCAGGAGGAGATGGAGCTCTACCGCCAGAAGGTG
GAGCCGCTGCGCGCAGAGCTCCAAQAGGGCGCGCGCCAGAAGCTGCACGAGCTGCGCCAGCGCTTGGCCGAG
CGCCTTGAGGCTCTCAAGGAGAACGGCGGCGCCAGACTGGCCGAGTACCACGCCAAGGCCACCGAGCATCTG
AGCACGCTCAGCGAGAAGGCCAAGCCCGCGCTCGAGGACCTCCGCCAAGGCCTGCTGCCCGTGCTGGAGAGC
TTCAAGGTCAGCTTCCTGAGCGCTCTCGAGGAGTACACTAAAAGCTCAACACCCACTGAGGCGCCCCGCCGC
CGCCCCCCTTCCCGGTGCTCAGAATAAAC

[0102] In a search of public sequence databases, the NOV3b nucleic acid sequence, located on chromosome 11, has 491 of 676 bases (72%) identical to a gb:GENBANK-ID:HSAPOAIT|acc:X07496.1 mRNA from Homo sapiens (Human Tangier apoA-I gene) (E=3.1e⁻⁶⁷). Public nucleotide databases include all GenBank databases and the GeneSeq patent database.

[0103] The disclosed NOV3b polypeptide (SEQ ID NO: 14) encoded by SEQ ID NO: 13 has 211 amino acid residues and is presented in Table 3B using the one-letter amino acid code. Signal P, Psort and/or Hydropathy results predict that NOV3b has a signal peptide and is likely to be localized extracellularly with a certainty of 0.3798. In other embodiments, NOV3b may also be localized to the microbody (peroxisome) with a certainty of 0.1141, in the endoplasmic reticulum (membrane) with a certainty of 0.1000, or in the endoplasmic reticulum (lumen) with a certainty of 0.1000. The most likely cleavage site for NOV3b is between positions 19 and 20, SQA-RH.

TABLE 3D
Encoded NOV3b protein sequence (SEQ ID NO:14).

MKAAVLTLAVLFLTGGSQARHWQQDEPPQSPWDRVKDLATVYVDVLKDSGDSVTSTFSKLRAEQLGPVTQEF
WDNLEKETEGLRQEMSKDLEEVKAKVQPYLDDFQKKWQEEMELYRQKVEPLRAELQEGARQKLHELRQRLAE
RLEALKENCGARLAEYHAKATEHLSTLSEKAKPALEDLRQGLLPVLESFKVSFLSALEEYTKKLNTQ

[0104] A search of sequence databases reveals that the NOV3b amino acid sequence has 106 of 161 amino acid residues (65%) identical to, and 121 of 161 amino acid residues (75%) similar to, the 267 amino acid residue ptnr:SWISSPROT-ACC:P02647 protein from Homo sapiens (Human) (Apolipoprotein A-I Precursor (APO-AI)) (E=5.6e⁻⁴⁷). Public amino acid databases include the GenBank databases, SwissProt, PDB and PIR.

[0105] NOV3b is expressed in at least Liver, Spleen, Ovary. Expression information was derived from the tissue sources of the sequences that were included in the derivation of the sequence of CuraGen Acc. No. CG55771-02.

[0106] NOV3a also has homology to the amino acid sequences shown in the BLASTP data listed in Table 3E.

TABLE 3E
BLAST results for NOV3a

| Gene Index/ | Protein/ | Length | Identity | Positives | |
|---|---|---|---|---|---|
| Identifier | Organism | (aa) | (%) | (%) | Expect |
| gi\|2119390\|pir\|\|I55 | proapo-A-I | 267 | 212/267 | 213/267 | 4e−95 |
| 236 | protein - human | | (79%) | (79%) | |
| gi\|4557321\|ref\|NP_0 | apolipoprote | 267 | 213/267 | 213/267 | 4e−95 |
| 00030.1\| | in A-I | | (79%) | (79%) | |
| (NM_000039) | precursor | | | | |
| | [Homo sapiens | | | | |
| gi\|178775\|gb\|AAA517 | proapolipoprotein | 249 | 207/249 | 207/249 | 2e−91 |
| 47.1\|(M29068) | [Homo sapiens | | (83%) | (83%) | |
| gi\|399042\|sp\|P15568\| | APOLIPOPROTE | 267 | 202/267 | 207/267 | 2e−90 |
| APA1_MACFA | IN A-I | | (75%) | (76% | |
| | PRECURSOR (APO-AI) | | | | |
| gi\|86614\|pir\|\|A26529 | apolipoprote | 267 | 202/267 | 207/267 | 2e−90 |
| | in A-I | | (75%) | (76%) | |
| | precursor - | | | | |
| | crab-eating | | | | |
| | macaque | | | | |

[0107] The homology of these sequences is shown graphically in the ClustalW analysis shown in Table 3F.

[image]

[image]

[0108] Table 3G lists the domain description from DOMAIN analysis results against NOV3a. This indicates that the NOV3a sequence has properties similar to those of other proteins known to contain this domain.

TABLE 3G
Domain Analysis of NOV3a

gnl|Pfam|pfam01442, Apolipoprotein, Apolipoprotein A1/A4/E family.
These proteins contain several 22 residue repeats which form a pair of
alpha helices. This family includes: Apolipoprotein A-I,
Apolipoprotein A-IV, and Apolipoprotein E. (SEQ ID NO:79)
CD-Length=262 residues, 95.0% aligned
Score=182 bits (461), Expect=2e−47

| | | | |
|---|---|---|---|
| Query: | 15 | GSQARHFWQQDEPPQSPWDRVKDLATVYVDVLKDS-------------------------- | 49 |
| | | \| \|\|\| \|\|\| \|\|\| \|\| \|\|+\|\|\| \|\|+ +\|\|\| | |
| Sbjct: | 14 | GCQAR-FWQADEP-QSQWDQVDKDRFWVYLRQVKDSADQAVEQLESSQVTQELNLLLQDNL | 71 |
| Query: | 50 | --VTSTFSKLREQLGPVTQEFWDNLEKETEGLRQEMSKDLEEVKAKVQPYLDDFQKKWQE | 107 |
| | | + \| +\|+\|\|\|\|\|\| \|\|\|\| \| \|\|\|+ \|\| \|+ \|\|\|\|+ + ++ \|\| \|+ \|+ + | |
| Sbjct: | 72 | DELKSYAEELQEQLGPVAQEFWARLSKETQALRAELGKDLEDVRNRLAPYRDELQQMLGQ | 131 |
| Query: | 108 | EMELYRQKVEPLRAELQEGARQKLHELQEKLSPLGEEMRDRARAHVDALRTHLAPYSDEL | 167 |
| | | +\| \|\|\|\|+\|\|\| \|\|++ \|+ \|\|\|++\|+\| \|\|+\|+\|\| +\|\|\|\|\|\| \| \|\| ++\| | |
| Sbjct: | 132 | NIEEYRQKLEPLARELRKRLRRDAEELQKRLAPYAEELRERAERNVDALRTRLGPYVEQL | 191 |
| Query: | 168 | RQRLAARLEALKENGGARLAEYHAKATEHLSTLSEKAKPALEDLRQGLLPVLESFKVSFL | 227 |
| | | \|\|+\| \|\|\| \|+\| \|\| + \| \|\| \| \|\| \| \|\|\|++ \| \|\|\|\| \| | |
| Sbjct: | 192 | RQKLTQRLEELRERAQPYAEEYKEQLEEQLSELREKLAPLREDLQEVLNPVLEQLKTQAE | 251 |
| Query: | 228 | SALEEYTKKLN | 238 |
| | | + \|\| \| | |
| Sbjct: | 252 | AFQEELKSWLE | 262 |

[0109] Apolipoprotein A-I is the major apoprotein of HDL and is a relatively abundant plasma protein with a concentration of 1.0-1.5 mg/ml. It is a single polypeptide chain with 243 amino acid residues of known primary amino acid sequence (Brewer et al., 1978). ApoA-I is a cofactor for LCAT (245900), which is responsible for the formation of most cholesteryl esters, in plasma. ApoA-I also promotes efflux of cholesterol from cells. The liver and small intestine are the sites of synthesis of apoA-I. The primary translation product of the APOAI gene contains both a pre and a pro segment, and posttranslational processing of apoA-I may be involved in the formation of the functional plasma apoA-I isoproteins. Dayhoff (1976) pointed to sequence homologies of A-I, A-II, C-I, and C-III.

[0110] Yui et al. (1988) found that apoA-I is identical to serum PGI(2) stabilizing factor (PSF). PGI(2), or prostacyclin, is synthesized by the vascular endothelium and smooth muscle, and functions as a potent vasodilator and inhibitor of platelet aggregation. The stabilization of PGI(2) by HDL and apoA-I may be an important protective action, against the accumulation of platelet thrombi at sites of vascular damage. The beneficial effects of HDL in the prevention of coronary artery disease may be partly explained by this effect. A-I(Milano) and A-I(Marburg) give rise to HDL deficiency. Other HDL deficiency states are Tangier disease (HDLDT1; 205400), LCAT deficiency (245900), and ‘fish-eye’ disease (136120).

[0111] Breslow et al. (1982) isolated and characterized cDNA clones for human apoA-I. Rees et al. (1983) studied the cloned APOAI gene and a DNA polymorphism 3-prime to it. In a healthy control population, the frequency of heterozygotes was about 5%. Among hypertriglyceridemic subjects, 34% were heterozygotes and about 6% were homozygotes for the variant. The primary gene transcript encodes a preproapoA-I containing 24 amino acids on the amino terminus of the mature plasma apoA-I (Law et al., 1983).

[0112] Law et al. (1984) assigned the APOA1 gene to 11p 11-q13 by filter hybridization analysis of human-mouse cell hybrid DNAs. The genes for apoA-I and apoC-III are on chromosome 9 in the mouse. Mouse homologs of other genes on human 11p (insulin, beta-globin, LDHA, HRAS) are situated on mouse chromosome 7. Using a cDNA probe to detect apoA-I structural gene sequences in human-Chinese hamster cell hybrids, Cheung et al. (1984) assigned the gene to the region 11q13-qter. Since other information had suggested 11p11-q13 as the location, the SRO becomes 11q13. It is noteworthy that in the mouse and in man, APOA1 and PGBD (called Ups in the mouse) are syntenic. Both are on chromosome 11 in man and chromosome 9 in the mouse. Bruns et al. (1984) localized the genes for apoA-I and apoC-III (previously shown to be in a 3-kb segment of the genome; Breslow et al., 1982; Shoulders et al., 1983) to chromosome 11 by Southern blot analysis of DNA from human-rodent cell hybrids. Because in the mouse apoA-I is on chromosome 9 and apoA-II is on chromosome 1 (Lusis et al., 1983), the gene for human apoA-II is probably not on chromosome 11. Indeed, APOA2 (107670) is on human chromosome 1. On the basis of data provided by Pearson (1987), the APOA1 locus was assigned to 11q23-qter by HGM9. This would place APOC3 and APOA4 in the same region. Because the XmnI genotype at the APOA1 locus was heterozygous in a boy with partial deletion of the long arm of chromosome 11, del(11)(q23.3-qter), Arinami et al. (1990) localized the gene to 11q23 by excluding the region 11q24-qter.

[0113] Haddad et al. (1986) found that in the rat, as in man, the APOA1, APOC3 and APOA4 genes are closely linked. Indeed, their direction of transcription, size, relative location and intron-exon organization were found to be remarkably similar to those of the corresponding human genes.

[0114] There are 8 well-characterized apolipoproteins: apoA-I, apoA-II, apoA-IV, apoB, apoC-I, apoC-II, apoC-III, and apoe. The APOA1 and APOC3 genes are oriented ‘foot-to-foot,’ i.e., the 3-prime end of APOA1 is followed after an interval of about 2.5 kb by the 3-prime end of APOC3 (Karathanasis et al., 1983).

[0115] In 4 generations of a Norwegian kindred, Schamaun et al. (1983) found, by 2-D electrophoresis, a variant of apolipoprotein A-I. Codominant inheritance was displayed. One homozygote was identified. There was no obvious cardiovascular disease, even in the homozygote. Karathanasis et al. (1983) found that a group of severely hypertriglyceridemic patients with types IV and V hyperlipoproteinemia had an increased frequency of an RFLP associated with the apoA-I gene. Rees et al. (1985) found a strong correlation between hypertriglyceridemia and a DNA sequence polymorphism located in or near the 3-prime noncoding region of APOC3 and revealed by digestion of human DNA with the restriction enzyme Sst-1 and hybridization with an APOA1 cDNA probe. In 74 hypertriglyceridemic Caucasians, 3 were homozygous and 23 were heterozygous for the polymorphism, giving a gene frequency of 0.19; none of 52 normotriglyceridemics had the polymorphism, although it was frequent in Africans, Chinese, Japanese, and Asian Indians. No differences in high density lipoprotein or in apolipoproteins A-I and C-III phenotypes were found in persons with or without the polymorphism. Ferns et al. (1985) found an uncommon allelic variant (called S2) of the apoA-I/C-III gene cluster in 10 of 48 postmyocardial infarction patients (21%). In 47 control subjects it was present in only 2 and in none of those who were normotriglyceridemic. (The S2 allele, a DNA polymorphism, is characterized by SstI restriction fragments of 5.7 and 3.2 kb length, whereas the common S1 allele produces fragments of 5.7 and 4.2 kb length.) Ferns et al. (1985) found no difference in the distribution of alleles in the highly polymorphic region of 11p near the insulin gene. Kessling et al. (1985) failed to find an association between any allele of several RFLPs studied and hypertriglyceridemia. Buraczynska et al. (1985) found association between an EcoRI polymorphism of the APOA1 gene and noninsulin-dependent diabetes mellitus.

[0116] Familial hypoalphalipoproteinemia, by far the most common of the forms of primary depression of HDL cholesterol, has been thought to be an autosomal dominant. It is associated with premature coronary artery disease and stroke (Vergani and Bettale, 1981; Third et al., 1984; Daniels et al., 1982). Using a PstI polymorphism at the 3-prime end of the APOA1 gene, Ordovas et al. (1986) found the rarer allele (‘3.3-kb band’) in 4.1% of 123 randomly selected control subjects and 3.3% of 30 subjects with no angiographic evidence of coronary artery disease. In contrast, among 88 patients who had severe coronary artery disease before age 60, as documented by angiography, the frequency was 32%. It was also found in 8 of 12 index cases of kindreds with familial hypoalphalipoproteinemia. Among all patients with coronary artery disease, 58% had HDL cholesterol levels below the 10th percentile; however, this frequency increased to 73% when patients with the 3.3-kb band were considered. Borecki et al. (1986) studied 16 kindreds ascertained through probands clinically determined to have primary hypoalphalipoproteinemia characterized by low HDL cholesterol but otherwise normal blood lipids. They concluded that ‘these families provided clear evidence for a major gene.’ Moll et al. (1986) measured apoA-I levels in families ascertained through cases of hypertension or early coronary artery disease. They concluded that the findings supported ‘a major effect of a single genetic locus on the quantitative variation of plasma apoA-I in a sample of pedigrees enriched for individuals at risk for coronary artery disease.’ Using a radioimmunoassay, Moll et al. (1989) measured plasma apoA-I levels in 1,880 individuals from 283 pedigrees. Complex segregation analysis suggested heterogeneous etiologies for the individual differences in adjusted apoA-I levels observed. The authors concluded that environmental factors and polygenic loci account for 32 and 65%, respectively, of the adjusted variation in a subset of 126 families. In the other 157 pedigrees, segregation analysis strongly supported the presence of a single locus accounting for 27% of the adjusted variation. In Japanese, Rees et al. (1986) found association of triglyceridemia with a different haplotype of the A-I/C-III region than that found in Caucasians.

[0117] Ferns et al. (1986) found a common allele of the APOA2 locus which showed a weak association with hypertriglyceridemia; in contrast, an uncommon allele of the APOA1-APOC3-APOA4 gene cluster demonstrated a stronger relationship with hypertriglyceridemia. Ferns et al. (1986) found higher levels of serum triglycerides with possession of both disease-related alleles than with either singly. Fager et al. (1981) found an inverse relationship between serum apoA-II and a risk of myocardial infarction. Hayden et al. (1987) found an association between certain RFLPs and familial combined hyperlipidemia (FCH; 144250). APOA1 is linked to THY1 (188230) at a distance of about 1 cM (Gatti, 1987); thus, the more distal location of this apolipoprotein cluster as suggested by other evidence may be true. In certain patients with premature atherosclerosis, Karathanasis et al. (1987) demonstrated a DNA inversion containing portions of the 3-prime ends of the APOA1 and APOC3 genes, including the DNA region between these genes. The breakpoints of this DNA inversion were found to be located between the fourth exon of the APOA1 gene and the first intron of the APOC3 gene; thus, the inversion results in reciprocal fusion of the 2 gene transcriptional units. The absence of transcripts with correct mRNA sequences causes deficiency of both apolipoproteins in the plasma of these patients, leading to atherosclerosis. Bojanovski et al. (1987) found that both proapolipoprotein A-I and the mature protein are metabolized abnormally rapidly in Tangier disease. Thompson et al. (1988) investigated the seeming paradox that 2 RFLPs at the A-I/C-III cluster were in strong linkage disequilibrium while a third variant, located between the 2 other markers, appeared to be in linkage equilibrium with these 2 ‘outside’ markers. Thompson et al. (1988) showed that, for the gene frequencies encountered, very large sample sizes would be required to demonstrate negative (i.e., repulsion-phase) linkage disequilibrium. Such numbers are usually difficult to attain in human studies. Therefore, failure to demonstrate linkage disequilibrium by conventional methods does not necessarily imply its absence.

[0118] Kessling et al. (1988) studied the high density lipoprotein-cholesterol concentrations along with restriction fragment length polymorphisms in the APOA2 and APOA1-APOC3-APOA4 gene cluster in 109 men selected from a random sample of 1,910 men aged 45 to 59 years. They found no significant difference in allelic frequencies at either locus between the groups of individuals with high and low HDL-cholesterol levels. They did find an association between a PstI RFLP associated with apoA-I and genetic variation determining the plasma concentration of apoA-I. No significant association was found between alleles for the apoA-II MspI RFLP and apoA-II or HDL concentrations. ApoA-I has 243 amino acids of known sequence. It is secreted into the bloodstream by the liver and intestine as a protein that is rapidly converted to mature apoA-I. Two major isoforms of mature, normal A-I, which arise by deamidation, can be separated in human serum. Antonarakis et al. (1988) studied DNA polymorphism of a 61-kb segment of 11q that contains the APOA1, APOC3, and APOA4 genes within a 15-kb stretch. Eleven RFLPs located within the 61-kb segment were used by haplotype analysis. Considerable linkage disequilibrium was found. Several haplotypes had arisen by recombination and the rate of recombination within the gene cluster was estimated to be at least 4 times greater than that expected based on uniform recombination. Taken individually, the polymorphism information content (PIC) of each of the 11 polymorphisms ranged from 0.053 to 0.375, while that of their haplotypes ranged between 0.858 and 0.862. (The PIC value, which was introduced by Botstein et al. (1980) in their classic paper on the use of RFLPs: as linkage markers, represents the sum of the frequency of each possible mating multiplied by the probability that an offspring will be informative.) By genetic linkage analysis using RFLPs in the APOA1/C3/C4 gene cluster,

[0119] Kastelein et al. (1990) showed that the mutation causing familial hypoalphalipoproteinemia (familial HDL deficiency) in a family of Spanish descent was not located in this cluster.

[0120] Smith et al. (1992) investigated the common G/A polymorphism in the APOA1 gene promoter at a position 76 bp upstream of the transcriptional start site (−76). Of 54 subjects whose apoA-I production rates had been determined by turnover studies, 35 were homozygous for a guanosine at this locus and 19 were heterozygous for a guanosine and adenosine (G/A). The apoA-I production rates were significantly lower (by 11%) in the G/A heterozygotes than in the G homozygotes (P=0.025). However, no effect on HDL cholesterol or apoA-I levels were noted. Differential gene expression of the 2 alleles was tested by linking each of the alleles to the reporter gene chloramphenicol acetyltransferase and determining relative promoter efficiencies after transfection into the human HepG2 hepatoma cell line. The A allele, as well as the G allele, expressed only 68%.

[0121] In addition to its ability to remove cholesterol from cells, HDL also delivers cholesterol to cells through a poorly defined process in which cholesteryl esters are selectively transferred from HDL particles into the cell without the uptake and degradation of the lipoprotein particle. In steroidogenic cells of rodents, the selective uptake pathway accounts for 90% or more of the cholesterol destined for steroid production or cholesteryl ester accumulation. To test the importance of the 3 major HDL proteins in determining cholesteryl ester accumulation in steroidogenic cells of the adrenal gland, ovary, and testis, Plump et al. (1996) used mice which had been rendered deficient in apoA-I, apoA-II, or apoE by gene targeting in embryonic stem cells. ApoE and apoA-II deficiencies were found to have only modest effects on cholesteryl ester accumulation. In contrast, apoA-I deficiency caused an almost complete failure to accumulate cholesteryl ester in steroidogenic cells. Plump et al. (1996) interpreted these results as indicating that apoA-I is essential for the selective uptake of HDL-cholesteryl esters. They stated that the lack of apoA-I has a major impact on adrenal gland physiology, causing diminished basal corticosteroid production, a blunted steroidogenic response to stress, and increased expression of compensatory pathways to provide cholesterol substrate for steroid production.

[0122] In studies of 3 restriction enzyme polymorphisms in the AI-CII-AIV gene cluster, Dallinga-Thie et al. (1997) analyzed haplotypes and showed an association with severe hyperlipidemia in subjects with FCH. Furthermore, nonparametric sib pair linkage analysis revealed significant linkage between these markers in the gene cluster and the FCH phenotype. The findings confirmed that the AI-CIII-AIV gene cluster contributes to the FCH phenotype, but this contribution is genetically complex. An epistatic interaction between different haplotypes of the gene cluster was demonstrated. They concluded that 2 different susceptibility loci exist in the gene cluster.

[0123] Naganawa et al. (1997) reported 2 haplotypes due to 5 polymorphisms in the intestinal enhancer region of the APOA1 gene in endoscopic biopsy samples from healthy volunteers. The mutant haplotype had a population frequency of 0.44; frequency of wildtype was 0.53. APOA1 mRNA levels were 49% lower in mutant haplotype homozygotes than in wildtype homozygotes, while APOA1 synthesis was 37% lower than wildtype in individuals homozygous for the mutant allele. Heterozygotes had 28% and 41% reductions of mRNA levels and APOA1 synthesis, respectively, as compared to wildtype homozygotes. Expression studies in Caco-2 cells showed a 46% decrease in transcriptional activity in cells containing the mutant constructs, and binding of Caco-2 nuclear proteins in mutant, but not wildtype, sequences. Naganawa et al. (1997) concluded that intestinal APOA1 transcription and protein synthesis were reduced in the presence of common mutations which induced nuclear protein binding.

[0124] Genschel et al. (1998) counted 4 naturally occurring mutant forms of apoA-I that were known at that time to result in amyloidosis. The most important feature of all variants was the very similar formation of N-terminal fragments found in the amyloid deposits. They summarized the specific features of all known amyloidogenic variants of APOA1 and speculated about the metabolic pathway involved.

[0125] To determine the frequency of de novo hypoalphalipoproteinemia in the general population due to mutation of the APOA1 gene, Yamakawa-Kobayashi et al. (1999) analyzed sequence variations in the APOA1 gene in 67 children with a low high-density lipoprotein (HDL) cholesterol level. These children were selected from 1,254 school children through a school survey. Four different mutations with deleterious potentia, 3 frameshifts and I splice site mutation, were identified in 4 subjects. The plasma apoA-I levels of the 4 children with these mutations were reduced to approximately half of the normal levels and were below the first percentile of the general population distribution (80 mg/dl). The frequency of hypoalphalipoproteinemia due to a mutant APOA1 gene was estimated at 6% in subjects with low HLD cholesterol levels and 0.3% in the Japanese population generally.

[0126] High density lipoprotein deficiency is also caused by mutations in the ABC1 gene (600046), which lead to reductions in cellular cholesterol efflux. The disorder is clinically and biochemically severe in the case of the recessively inherited Tangier disease, whereas it is milder in the dominantly inherited type 2 familial high density lipoprotein deficiency (604091).

[0127] The disclosed NOV3 nucleic acid of the invention encoding a Apolipoprotein A-I precursor-like protein includes the nucleic acid whose sequence is provided in Table 3A, 3C, or a fragment thereof. The invention also includes a mutant or variant nucleic acid any of whose bases may be changed from the corresponding base shown in Table 3A, or 3C while still encoding a protein that maintains its Apolipoprotein A-I precursor-like activities and physiological functions, or a fragment of such a nucleic acid. The invention further includes nucleic acids whose sequences are complementary to those just described, including nucleic acid fragments that are complementary to any of the nucleic acids just described. The invention additionally includes nucleic acids or nucleic acid fragments, or complements thereto, whose structures include chemical modifications. Such modifications include, by way of nonlimiting example, modified bases, and nucleic acids whose sugar phosphate backbones are modified or derivatized. These modifications are carried out at least in part to enhance the chemical stability of the modified nucleic acid, such that they may be used, for example, as antisense binding nucleic acids in therapeutic applications in a subject. In the mutant or variant nucleic acids, and their complements, up to about 1% percent of the bases may be so changed.

[0128] The disclosed NOV3 protein of the invention includes the Apolipoprotein A-I precursor-like protein whose sequence is provided in Table 3B, or 3D. The invention also includes a mutant or variant protein any of whose residues may be changed from the corresponding residue shown in Table 3B, or 3D while still encoding a protein that maintains its Apolipoprotein A-I precursor-like activities and physiological functions, or a functional fragment thereof. In the mutant or variant protein, up to about 25 percent of the residues may be so changed.

[0129] The protein similarity information, expression pattern, and map location for the Apolipoprotein A-I precursor-like protein and nucleic acid (NOV3) disclosed herein suggest that NOV3 may have important structural and/or physiological functions characteristic of the citron kinase-like family. Therefore, the NOV3 nucleic acids and proteins of the invention are useful in potential diagnostic and therapeutic applications. These include serving as a specific or selective nucleic acid or protein diagnostic and/or prognostic marker, wherein the presence or amount of the nucleic acid or the protein are to be assessed, as well as potential therapeutic applications such as the following: (i) a protein therapeutic, (ii) a small molecule drug target, (iii) an antibody target (therapeutic, diagnostic, drug targeting/cytotoxic antibody), (iv) a nucleic acid useful in gene therapy (gene delivery/gene ablation), and (v) a composition promoting tissue regeneration in vitro and in vivo.

[0130] The NOV3 nucleic acids and proteins of the invention are useful in potential diagnostic and therapeutic applications implicated in various diseases and disorders described below. For example, the compositions of the present invention will have efficacy for treatment of patients suffering from coronary artery disease, stroke, hypertriglyceridemia, hypoalphalipoproteinemia, hyperlipidemia, Tangier disease, LCAT deficiency, ‘fish-eye’ disease, noninsulin-dependent diabetes mellitus, hypertension, myocardial infarction, atherosclerosis, and/or other pathologies.

[0131] NOV3 nucleic acids and polypeptides are further useful in the generation of antibodies that bind immunospecifically to the novel substances of the invention for use in therapeutic or diagnostic methods. These antibodies may be generated according to methods known in the art, using prediction from hydrophobicity charts, as described in the “Anti-NOVX Antibodies” section below. For example the disclosed NOV3 protein have multiple hydrophilic regions, each of which can be used as an immunogen. In one embodiment, contemplated NOV3 epitope is from about amino acids 20 to 40. In another embodiment, a NOV3 epitope is from about amino acids 50 to 220. In additional embodiments, NOV3 epitopes are from about amino acids 240 to 260. This novel protein also has value in development of powerful assay system for functional analysis of various human disorders, which will help in understanding of pathology of the disease and development of new drug targets for various disorders.

[0132] NOV4

[0133] NOV4 includes three novel HSP90 co-chaperone-like proteins disclosed below. The disclosed sequences have been named NOV4a, NOV4b, and NOV4c.

[0134] NOV4a

[0135] A disclosed NOV4a nucleic acid of 513 nucleotides (designated CuraGen Acc. No. CG55700-01) encoding a novel HSP90 co-chaperone-like protein is shown in Table 4A. An open reading frame was identified beginning with an ATG initiation codon at nucleotides 54-56 and ending with a TAA codon at nucleotides 444-446. A putative untranslated region downstream from the termination codon is underlined in Table 4A, and the start and stop codons are in bold letters.

TABLE 4A
NOV4a Nucleotide Sequence (SEQ ID NO:15)

CATTTGCTGTCTCCTCTGCTCACCAGTTCGCCCGTCCCCCTGCCCCGTTC
ACAATGCAGCCTGCTTCTGCAAAGTGGTACGATCGAAGGGACTATGTCTT
CATTGAATTTTGTGTTGAAGACAGTAAGGATGTTAATGTAAATTTTGAAA
AATCCAAACTTACATTCAGTTGTCTCGGAGGAAGTGATAATTTTAAGCAT
TTAAATGAAATTGATCTTTTTCACTGTATTGATCCAAATGATTCCAAGCA
TAAAAGAACGGACAGATCAATTTTATGTTGTTTACGAAAAGGAGAATCTG
GCCAGTCATGGCCAAGGTTAACAAAAGAAAGGGCAAAGATGATGAACAAC
ATGGGTGGTGATGAGGATGTAGATTTACCAGAAGTAGATGGAGCAGATGA
TGATTCACAAGACAGTGATGATGAAAAAATGCCAGATCTGGAGTAAGGAA
TATTGTCATCACCTGGATTTTGAGAAAGAAAAATAACTTCTCTGCAAGAT
TTCATAATTGAGA

[0136] The nucleic acid sequence of 354 of 388 bases (91%) identical to a gb:GENBANK-ID:HUMPRA|acc:L24804.1 mRNA from Homo sapiens (Human (p23) mRNA, complete cds) (E=3.3e⁻⁶⁶).

[0137] A NOV4a polypeptide (SEQ ID NO: 16) encoded by SEQ ID NO: 15 is 130 amino acid residues and is presented using the one letter code in Table 4B. Signal P, Psort and/or Hydropathy results predict that NOV4a has no signal peptide and is likely to be localized at the nucleus with a certainty of 0.4600. In other embodiments, NOV4a may also be localized to the microbody (peroxisome) with a certainty of 0.3000, the mitochondrial membrane space with a certainty of 0.1000, or the lysosome (lumen) with a certainty of 0.1000.

TABLE 4B
NOV4a protein sequence (SEQ ID NO:16)

MQPASAKWYDRRDYVFIEFCVEDSKDVNVNFEKSKLTFSCLGGSDNFKHL
NEIDLFHCIDPNDSKHKRTDRSILCCLRKGESGQSWPRLTKERAKMMNNM
GGDEDVDLPEVDGADDDSQDSDDEKMPDLE

[0138] The full amino acid sequence of the protein of the invention was found to have 101 of 122 amino acid residues (82%) identical to, and 107 of 122 amino acid residues (87%) similar to, the 160 amino acid residue ptnr:SWISSNEW-ACC:Q15185 protein from Homo sapiens (Human) (HSP90 Co-Chaperone (Progesterone Receptor Complex P23)) (E=7.9e⁻⁵¹).

[0139] NOV4 is expressed in at least Adrenal Gland/Suprarenal gland, Amnion, Amygdala, Aorta, Appendix, Ascending Colon, Bone, Bone Marrow, Brain, Bronchus, Brown adipose, Cartilage, Cervix, Chorionic Villus, Cochlea, Colon, Cornea, Coronary Artery, Dermis, Duodenum, Epidermis, Foreskin, Gall Bladder, Gastro-intestinal/Digestive System, Hair Follicles, Heart, Hippocampus, Islets of Langerhans, Kidney, Kidney Cortex, Larynx, Left cerebellum, Liver, Lung, Lung Pleura, Lymph node, Lymphoid tissue, Mammary gland/Breast, Muscle, Ovary, Oviduct/Uterine Tube/Fallopian tube, Pancreas, Parathyroid Gland, Parietal Lobe, Parotid Salivary glands, Peripheral Blood, Pharynx, Pituitary Gland, Placenta, Prostate, Retina, Right Cerebellum, Salivary Glands, Skin, Small Intestine, Spinal Chord, Spleen, Stomach, Substantia Nigra, Temporal Lobe, Testis, Thalamus, Thymus, Thyroid, Tonsils, Trachea, Umbilical Vein, Urinary Bladder, Uterus, Vein, Vulva, Whole Organism. This information was derived by determining the tissue sources of the sequences that were included in the invention including but not limited to SeqCalling sources, Public EST sources, Literature sources, and/or RACE sources.

[0140] NOV4b

[0141] In the present invention, the target sequence identified previously, NOV4a, was subjected to the exon linking process to confirm the sequence. PCR primers were designed by starting at the most upstream sequence available, for the forward primer, and at the most downstream sequence available for the reverse primer. In each case, the sequence was examined, walking inward from the respective termini toward the coding sequence, until a suitable sequence that is either unique or highly selective was encountered, or, in the case of the reverse primer, until the stop codon was reached. Such primers were designed based on in silico predictions for the full length cDNA, part (one or more exons) of the DNA or protein sequence of the target sequence, or by translated homology of the predicted exons to closely related human sequences sequences from other species. These primers were then employed in PCR amplification based on the following pool of human cDNAs: adrenal gland, bone marrow, brain—amygdala, brain—cerebellum, brain—hippocampus, brain—substantia nigra, brain—thalamus, brain—whole, fetal brain, fetal kidney, fetal liver, fetal lung, heart, kidney, lymphoma—Raji, mammary gland, pancreas, pituitary gland, placenta, prostate, salivary gland, skeletal muscle, small intestine, spinal cord, spleen, stomach, testis, thyroid, trachea, uterus. Usually the resulting amplicons were gel purified, cloned and sequenced to high redundancy. The resulting sequences from all clones were assembled with themselves, with other fragments in CuraGen Corporation's database and with public ESTs. Fragments and ESTs were included as components for an assembly when the extent of their identity with another component of the assembly was at least 95% over 50 bp. In addition, sequence traces were evaluated manually and edited for corrections if appropriate. These procedures provide the sequences reported below, which are designated NOV4b .

[0142] A disclosed NOV4b nucleic acid of 520 nucleotides (designated CuraGen Acc. No. CG55700-02) encoding a novel HSP90 Co-Chaperone (Progesterone Receptor Complex P23)-like protein is shown in Table 4C. An open reading frame was identified beginning with an ATG initiation codon at nucleotides 1-3 and ending with a TAA codon at nucleotides 481-483. A putative untranslated region downstream from the termination codon is underlined in Table 4C, and the start and stop codons are in bold letters.

TABLE 4C
NOV4b Nucleotide Sequence (SEQ ID NO:17)

ATGCAGCCTGCTTCTGCAAAGTGGTACGATCGAAGGGACTATGTCTTCAT
TGAATTTTGTGTTGAAGACAGTAAGGATGTTAATGTAAATTTTGAAAAAT
CCAAACTTACATTCAGTTGTCTCGGAGGAAGTGATAATTTTAAGCATTTA
AATGAAATTGATCTTTTTCACTGTATTGATCCAAATGATTCCAAGCATAA
AAGAACGGACAGATCAATTTTATGTTGTTTACGAAAAGGAGAATCTGGCC
AGTCATGGCCAAGGTTAACAAAAGAAAGGGCAAAGCTTAATTGGCTTAGT
GTCGACTTCAATAATTGGAAAGACTGGGAAGATGATTCAGATGAAGACAT
GTCTAATTTTGATCGTTTCTCTGAGATGATGAACAACATGGGTGGTGATG
AGGATGTAGATTTACCAGAAGTAGATGGAGCAGATGATGATTCACAAGAC
AGTGATGATGAAAAAATGCCAGATCTGGAGTAAGGAATATTGTCATCAC
CTGGATTTTGAGAAAGAAAAA

[0143] A NOV4b polypeptide (SEQ ID NO: 18) encoded by SEQ ID NO: 17 is 160 amino acid residues and is presented using the one letter code in Table 4D.

TABLE 4D
NOV4b protein sequence (SEQ ID NO:18)

MQPASAKWYDRRDYVFIEFCVEDSKDVNVNFEKSKLTFSCLGGSDNFKHL
NEIDLFHCIDPNDSKHKRTDRSILCCLRKGESGQSWPRLTKERAKLNWLS
VDFNNWKDWEDDSDEDMSNFDRFSEMMNNMGGDEDVDLPEVDGADDDSQD
SDDEKMPDLE

[0144] The human cDNA encodes a protein of 160 amino acids that does not show homology to previously identified proteins. The chicken and human cDNAs are 88% identical at the DNA level and 96.3% identical at the protein level. p23 is a highly acidic phosphoprotein with an aspartic acid-rich carboxy-terminal domain. Bacterially overexpressed human p23 was used to raise several monoclonal antibodies to p23. These antibodies specifically immunoprecipitate p23 in complex with hsp90 in all tissues tested and can be used to immunoaffinity isolate progesterone receptor complexes from chicken oviduct cytosol.

[0145] NOV4c

[0146] In the present invention, the target sequence identified previously NOV4a, was subjected to the exon linking process to confirm the sequence. PCR primers were designed by starting at the most upstream sequence available, for the forward primer, and at the most downstream sequence available for the reverse primer. In each case, the sequence was examined, walking inward from the respective termini toward the coding sequence, until a suitable sequence that is either unique or highly selective was encountered, or, in the case of the reverse primer, until the stop codon was reached. Such primers were designed based on in silico predictions for the full length cDNA, part (one or more exons) of the DNA or protein sequence of the target sequence, or by translated homology of the predicted exons to closely related human sequences sequences from other species. These primers were then employed in PCR amplification based on the following pool of human cDNAs: adrenal gland, bone marrow, brain—amygdala, brain—cerebellum, brain—hippocampus, brain—substantia nigra, brain—thalamus, brain—whole, fetal brain, fetal kidney, fetal liver, fetal lung, heart, kidney, lymphoma—Raji, mammary gland, pancreas, pituitary gland, placenta, prostate, salivary gland, skeletal muscle, small intestine, spinal cord, spleen, stomach, testis, thyroid, trachea, uterus. Usually the resulting amplicons were gel purified, cloned and sequenced to high redundancy. The resulting sequences from all clones were assembled with themselves, with other fragments in CuraGen Corporation's database and with public ESTs. Fragments and ESTs were included as components for an assembly when the extent of their identity with another component of the assembly was at least 95% over 50 bp, In addition, sequence traces were evaluated manually and edited for corrections if appropriate. These procedures provide the sequences reported below, which are designated Accession Number NOV4c

[0147] A disclosed NOV4c nucleic acid of 426 nucleotides (designated CuraGen Acc. No. CG55700-03) encoding a novel HSP90 co-chaperone -like protein is shown in Table 4E. An open reading frame was identified beginning with a CCT initiation codon at nucleotides 1-3 and ending at nucleotides 424-426. The start codon is in bold letters in Table 4E. Because the initiation codon is not a traditional initiation codon, and the lack of a termination codon, NOV4c could be a partial reading frame that could be extended in the 5′ or 3′ directions.

TABLE 4E
NOV4c Nucleotide Sequence (SEQ ID NO:19)

CCTGCTTCTGCAAAGTGGTACGATCGAAGGGACTATGTCTTCATTGAATT
TTGTGTTGAAGACAGTAAGGATGTTAATGTAAATTTTGAAAAATCCAAAC
TTACATTCAGTTGTCTCGGAGGAAGTGATAATTTTAAGCATTTAAATGAA
ATTGATCTTTTTCACTGTATTGATCCAAATGATTCCAAGCATAAAAGAAC
GGACAGATCAATTTTATGTTGTTTACGAAAAGGAGAATCTGGCCAGTCAT
GGCCAAGGTTAACAAAAGAAAGGGCAAAGCTTAATTGGCTTAGTGTCGAC
TTCAATAATTGGAAAGACTGGGAAGATGATTCAGATGAAGACATGTCTAA
TTTTGATCGTTTCTCTGAGAAATGCCAGATCTGGAGTAAGGAATATTGTC
ATCACCTGGATTTGAAGAAAGAAAAA

[0148] The nucleic acid sequence of NOV4, localized to chromosome 12, has 399 of 423 bases (94%) identical to a gb:GENBANK-ID:HUMPRA|acc:L24804.1 mRNA from Homo sapiens (Human (p23) mRNA, complete cds) (E=7.0e⁻⁷⁸).

[0149] A NOV4c polypeptide (SEQ ID NO: 20) encoded by SEQ ID NO: 19 is 142 amino acid residues and is presented using the one letter code in Table 4F. Signal P, Psort and/or Hydropathy results predict that NOV4c has no signal peptide and is likely to be localized at the microbody (peroxisome) with a certainty of 0.7015. In other embodiments, NOV4c may also be localized to the nucleus with a certainty of 0.4600, the mitochondrial membrane space with a certainty of 0.1000, or the lysosome (lumen) with a certainty of 0.1000.

TABLE 4F
NOV4c protein sequence (SEQ ID NO:20)

PASAKWYDRRDYVFIEFCVEDSKDVNVNFEKSKLTFSCLGGSDNFKHLNE
IDLFHCIDPNDSKHKRTDRSILCCLRKGESGQSWPRLTKERAKLNWLSVD
FNNWKDWEDDSDEDMSNFDRFSEKCQIWSKEYCHHLDLKKEK

[0150] The full amino acid sequence of the protein of the invention was found to have 123 of 123 amino acid residues (100%) identical to, and 123 of 123 amino acid residues (100%) similar to, the 160 amino acid residue ptnr:SWISSNEW-ACC:Q1 5185 protein from Homo sapiens (Human) (HSP90 Co-Chaperone (Progesterone Receptor Complex P23)) (E=1.5e⁻⁶⁷).

[0151] NOV4c is expressed in at least liver, pancreas, lymph node, hepatocellular carcinoma. Expression information was derived from the tissue sources of the sequences that were included in the derivation of the sequence of CuraGen Acc. No. CG55700-03.

[0152] NOV4a also has homology to the amino acid sequences shown in the BLASTP data listed in Table 4G.

TABLE 4G
BLAST results for NOV4a

| Gene Index/ | | Length | Identity | Positives | |
|---|---|---|---|---|---|
| Identifier | Protein/Organism | (aa) | (%) | (%) | Expect |
| gi\|1362904\|pir\| | progesterone | 160 | 121/160 | 121/160 | 2e−55 |
| \|A56211 | receptor-related | | (75%) | (75% | |
| | protein p23 - | | | | |
| | human | | | | |
| gi\|8928249\|sp\| | TELOMERASE- | 160 | 119/160 | 121/160 | 2e−54 |
| Q9R0Q7\|P23_MOUSE | BINDING | | (74%) | (75%) | |
| | PROTEIN P23 | | | | |
| | (HSP90 | | | | |
| | CO-CHAPERONE) | | | | |
| | (PROGESTERONE | | | | |
| | RECEPTOR | | | | |
| | COMPLEX P23) | | | | |
| gi\|5081800\|gb\| | telomerase binding | 160 | 117/160 | 119/160 | 9e−53 |
| AAD39543.1\| | protein p23 [ | | (73%) | (74%) | |
| AF153479_1 | Mus musculus] | | | | |
| (AF153479) | | | | | |
| gi\|1362727\|pir\|\| | progesterone | 160 | 116/160 | 120/160 | 2e−52 |
| B56211 | receptor-related | | (72%) | (74%) | |
| | protein p23 - | | | | |
| | chicken | | | | |
| gi\|9257073\|pdb\|1EJF\|A | Chain A, Crystal | 125 | 95/96 | 96/96 | 4e−47 |
| | Structure Of The | | (98%) | (99%) | |
| | Human Co-Chaperone | | | | |
| | P23 | | | | |

[0153] The homology of these sequences is shown graphically in the ClustalW analysis shown in Table 4H.

[image]

[0154] Using immunoprecipitation of unactivated avian progesterone receptor, Johnson et al. (Mol Cell Biol 1994; 14:1956-63) purified hsp90, hsp70, and three additional proteins, p54, p50, and p23. p23 is also present in immunoaffinity-purified hsp9o complexes along with hsp70 and another protein, p60. Antibody and cDNA probes for p23 were prepared in an effort to elucidate the significance and function of this protein. Antibodies to p23 detect similar levels of p23 in all tissues tested and cross-react with a protein of the same size in mice, rabbits, guinea pigs, humans, and Saccharomyces cerevisiae, indicating that p23 is a conserved protein of broad tissue distribution. These antibodies were used to screen a chicken brain cDNA library, resulting in the isolation of a 468-bp partial cDNA clone encoding a sequence containing four sequences corresponding to peptide fragments isolated from chicken p23. This partial clone was subsequently used to isolate a full-length human cDNA clone. The human cDNA encodes a protein of 160 amino acids that does not show homology to previously identified proteins. The chicken and human cDNAs are 88% identical at the DNA level and 96.3% identical at the protein level. p23 is a highly acidic phosphoprotein with an aspartic acid-rich carboxy-terminal domain. Bacterially overexpressed human p23 was used to raise several monoclonal antibodies to p23. These antibodies specifically immunoprecipitate p23 in complex with hsp90 in all tissues tested and can be used to immunoaffinity isolate progesterone receptor complexes from chicken oviduct cytosol.

[0155] The disclosed NOV4 nucleic acid of the invention encoding a HSP90 co-chaperone-like protein includes the nucleic acid whose sequence is provided in Table 4A, 4C, 4E or a fragment thereof. The invention also includes a mutant or variant nucleic acid any of whose bases may be changed from the corresponding base shown in Table 4A, 4C, or 4E while still encoding a protein that maintains its HSP90 co-chaperone -like activities and physiological functions, or a fragment of such a nucleic acid. The invention further includes nucleic acids whose sequences are complementary to those just described, including nucleic acid fragments that are complementary to any of the nucleic acids just described. The invention additionally includes nucleic acids or nucleic acid fragments, or complements thereto, whose structures include chemical modifications. Such modifications include, by way of nonlimiting example, modified bases, and nucleic acids whose sugar phosphate backbones are modified or derivatized. These modifications are carried out at least in part to enhance the chemical stability of the modified nucleic acid, such that they may be used, for example, as antisense binding nucleic acids in therapeutic applications in a subject. In the mutant or variant nucleic acids, and their complements, up to about 9% percent of the bases may be so changed.

[0156] The disclosed NOV4 protein of the invention includes the HSP90 co-chaperone-like protein whose sequence is provided in Table 4B, 4D, or 4F. The invention also includes a mutant or variant protein any of whose residues may be changed from the corresponding residue shown in Table 4B, 4D, or 4F while still encoding a protein that maintains its HSP90 co-chaperone -like activities and physiological functions, or a functional fragment thereof. In the mutant or variant protein, up to about 28% percent of the residues may be so changed.

[0157] The protein similarity information, expression pattern, and map location for the HSP90 co-chaperone-like protein and nucleic acid (NOV4) disclosed herein suggest that this NOV4 protein may have important structural and/or physiological functions characteristic of the HSP90 co-chaperone family. Therefore, the NOV4 nucleic acids and proteins of the invention are useful in potential diagnostic and therapeutic applications. These include serving as a specific or selective nucleic acid or protein diagnostic and/or prognostic marker, wherein the presence or amount of the nucleic acid or the protein are to be assessed, as well as potential therapeutic applications such as the following: (i) a protein therapeutic, (ii) a small molecule drug target, (iii) an antibody target (therapeutic, diagnostic, drug targeting/cytotoxic antibody), (iv) a nucleic acid useful in gene therapy (gene delivery/gene ablation), and (v) a composition promoting tissue regeneration in vitro and in vivo.

[0158] The NOV4 nucleic acids and proteins of the invention are useful in potential diagnostic and therapeutic applications implicated in various diseases and disorders described below. For example, the compositions of the present invention will have efficacy for treatment of patients suffering from adrenoleukodystrophy, congenital adrenal hyperplasia, hemophilia, hypercoagulation, idiopathic thrombocytopenic purpura, autoimmune disease, allergies, asthma, immunodeficiencies, transplantation, graft versus host disease, Von Hippel-Lindau (VHL) syndrome, Alzheimer's disease, stroke, tuberous sclerosis, hypercalceimia, Parkinson's disease, Huntington's disease, cerebral palsy, epilepsy, Lesch-Nyhan syndrome, multiple sclerosis, ataxia-telangiectasia, leukodystrophies, behavioral disorders, addiction, anxiety, pain, neuroprotection, arthritis, tendonitis, fertility, atherosclerosis, aneurysm, hypertension, fibromuscular dysplasia, stroke, scleroderma, obesity, myocardial infarction, embolism, cardiovascular disorders, bypass surgery, cirrhosis, inflammatory bowel disease, diverticular disease, Hirschsprung's disease, Crohn's Disease, appendicitis, ulcers, diabetes, renal artery stenosis, interstitial nephritis, glomerulonephritis, polycystic kidney disease, systemic lupus erythematosus, renal tubular acidosis, IgA nephropathy, laryngitis, emphysema, ARDS, lymphedema, muscular dystrophy, myasthenia gravis, endometriosis, pancreatitis, hyperparathyroidism, hypoparathyroidism, growth and reproductive disorders, xerostomia, psoriasis, actinic keratosis, acne, hair growth/loss, allopecia, pigmentation disorders, endocrine disorders, tonsillitis, cystitis, incontinence, and/or other pathologies. The NOV4 nucleic acids, or fragments thereof, may further be useful in diagnostic applications, wherein the presence or amount of the nucleic acid or the protein are to be assessed.

[0159] NOV4 nucleic acids and polypeptides are further useful in the generation of antibodies that bind immunospecifically to the novel substances of the invention for use in therapeutic or diagnostic methods. These antibodies may be generated according to methods known in the art, using prediction from hydrophobicity charts, as described in the “Anti-NOVX Antibodies” section below. For example, the disclosed NOV4 protein has multiple hydrophilic regions, each of which can be used as an immunogen. In one embodiment, a contemplated NOV4 epitope is from about amino acids 5 to 125. These novel proteins can be used in assay systems for functional analysis of various human disorders, which will help in understanding of pathology of the disease and development of new drug targets for various disorders.

[0160] NOV5

[0161] A disclosed NOV5 nucleic acid of 2993 nucleotides (also referred to as CG55706-01) encoding a novel Type III adenylyl cyclase-like protein is shown in Table SA. An open reading frame was identified beginning with an ATG initiation codon at nucleotides 148-150 and ending with a TAG codon at nucleotides 2431-2433. Putative untranslated regions upstream from the initiation codon and downstream from the termination codon are underlined in Table 5A, and the start and stop codons are in bold letters.

TABLE 5A
NOV5 Nucleotide Sequence (SEQ ID NO:21)

GCTGGAGGTGGCCTCCCCTCCGCCCCAGACAAGAAGAGGCCCTCAGCCCT
CCCCCGGTCTCAGAGAGCCCTGAGAGGAGGCCCAGTCCAGAGCTCTTCCT
CCGTTCCCAGTCCACTTCTCTAGGGCCAGTAGCAGACACCAGCCAGTATG
CCGAGGAACCAGGGCTTCTCCGAGCCCGAATACTCGGCCGAGTACTCAGC
CGAGTACTCCGTCAGCCTGCCCTCGGACCCTGACCGCGGGGTGGGCCGGA
CCCATGAAATCTCGGTCCGGAACTCGGGCTCCTGCCTGTGCCTGCCTCGC
TTCATGCGGCGCGGCTCTGCGGGGAGCAGCCCTCGGGCGCGCCGAGCTCT
CCCGCCCCAGCCCGCGCGGGGACCGTCCCGGAGCACGCGGTGGCCGAGTT
CCCGCACAGTTCTAGCTGATCAGTGCTACCTGTGCTCTGGAAACCCGCTC
TGCGTTCCTGCTGGAGGTGGCCTCCCCTTCGCCCCAGACAAGAAGAGGCC
CTCAGCCCTCCCCCGGTCTCAGAGAGCCCTGAGAGGAGGCCCAGTCCAGA
GCTCTTCCTCAAAGTCCAGCTCCCCTGCCCTCATTGAGACCAAGGAGCCC
AACGGGAGTGCCCACAGCAGTGGGTCCACGTCGGAGAAGCCCGAGGAGCA
GGATGCCCAGGCCGACAACCCCTCATTCCCCAACCCACGCCGGAGGCTGC
GCCTGCAGGACCTGGCTGACCGAGTGGTGGATGCCTCTGAAGATGAGCAC
GAGCTCAACCAGCTGCTCAACGAGGCCCTGCTTGAGCGAGAGTCCGCCCA
AGTAGTAAAGAAGAGAAACACCTTCCTCTTGTCCATGCGGTTCATGGACC
CCGAGATGGAAACCCGCTACTCGGTGGAGAAGGAGAAGCAGAGTGGGGCT
GCCTTCAGCTGCTCCTGCGTCGTCCTGCTCTGCACGGCCCTGGTCGAGAT
ACTCATCGACCCCTGGCTAATGACAAACTATGTGACCTTCATGGTGGGGG
AGATTCTGCTCCTCATCCTGACCATCTGCTCCCTGGCTGCCATCTTTCCC
CGGGCCTTTCCTAAGAAGCTTGTGGCCTTCTCAACTTGGATTGACCGGAC
CCGCTGGGCCAGGAACACCTGGGCCATGCTCGCCATCTTCATCCTGGTGA
TGGCAAATGTCGTGGACATGCTCAGCTGTCTCCAGTACTACACGGGACCC
AGCAATGCAACGGCAGGGATGGAGACGGAGGGCAGCTGCCTGGAGAACCC
CAAGTATTACAACTATGTGGCCGTGCTGTCCCTCATCGCCACCATCATGC
TGGTGCAGGTCAGCCACATGGTGAAGCTCACGCTCATGCTGCTCGTCGCA
GGCGCCGTGGCCACCATCAACCTCTATGCCTGGCGTCCCGTCTTTGATGA
ATACGACCACAAGCGTTTTCGGGAGCACGACTTACCTATGGTGGCCTTAG
AGCAGATGCAAGGATTCAACCCTGGGCTCAATGGCACTGACAGGCTGCCC
CTGGTGCCTTCCAAGTACTCTATGACGGTGATGGTGTTCCTCATGATGCT
CAGCTTCTACTACTTCTCCCGCCACGTAGAAAAACTGGCACGGACACTTT
TCTTGTGGAAGATTGAGGTCCACGACCAGAAGGAACGTGTCTATGAGATG
CGACGCTGGAACGAGGCCTTGGTCACCAACATGTTGCCTGAGCACGTGGC
ACGCCATTTCCTGGGGTCCAAGAAGAGAGATGAGGAGCTGTATAGCCAGA
CGTATGATGAGATTGGAGTCATGTTTGCCTCCCTGCCCAACTTTGCTGAC
TTCTACACAGAGGAGAGCATCAACAATGGTGGTATTGAGTGTCTGCGTTT
CCTCAATGAAATCATCTCAGATTTTGACTCTCTCCTGGACAATCCCAAGT
TCCGGGTGATCACCAAGATCAAAACCATTGGCAGCACGTATATGGCGGCT
TCAGGAGTCACCCCCGATGTCAACACCAATGGCTTTGCCAGCTCCAACAA
GGAAGACAAGTCCGAGAGAGAGCGCTGGCAGCACCTGGCTGACCTGGCCG
ACTTCGCGCTGGCCATGAAGGATACGCTCACCAACATCAACAACCAGTCC
TTCAATAACTTCATGCTGCGCATAGGCATGAACAAAGGCGGGGTTCTGGC
TGGGGTCATCGGAGCCCGGAAACCACACTACGACATCTGGGGCAATACAG
TCAATGTAGCCAGCAGGATGGAGTCCACGGGGGTCATGGGCAACATTCAG
GTGGTAGAAGAAACCCAAGTCATCCTCCGAGAGTACGGCTTCCGCTTTGT
GAGGCGAGGCCCCATCTTTGTGAAGGGGAAGGGGGAGCTGCTGACCTTCT
TCTTGAAGGGGCGGGATAAGCTAGCCACCTTCCCCAATGGCCCCTCTGTC
ACACTGCCCCACCAGGTGGTGGACAACTCCTGAATGGCCTCGAGCCTGAA
ACAGTCCAAACCGGAAGGGAGAATTTATTTTTTGAAACTGAAGGAAGTC
CCGACCTTCCTGGATTGAAGTGCACACTCATGGACTTTAGGTTTAGAAAC
CTCCTCAGCCTTCATTTGTTCGTGGATGTGTGAGCTCTGAGGGTGGCCCT
GCTATTCCTCTGCGTGCCTGTAGTGTCCCCAGCATAGGGGTCTTAGGCAT
AGGGCTGAACAGTCCTTCCAGAGCCCTCGTTCCAATCCCTGCCGTCCTTG
CCCCTGAGGGGCCCTGACCACTGTGAGCAGGAGGGTGGCAGAGCTGGGAC
AAAGCTGCCTTTGCCGCTGGGCTTTCCGGGACTGTGGAGGGAGCACAGGC
GGGGAAGCTCCACTTCAGACAGGGCTTGGTGGGGCAGGACATGGCTCCCA
TTTTGAAGGGAGGTCTCCATGTGGTCCGAGTGAGGTGAGACGGCCCTCGT
CCTGGTGTTCCTGATCATCTTGAAAGGTTCTTCTGGAACTCCTGTCCCCT
TAGTCATGAGAACAGAAAGTGCAATATTTCCTTTCACCTGGCCC

[0162] The NOV5 nucleic acid was identified on the p22-p24 region of chromosome 2 and has 2489 of 2526 bases (98%) identical to a gb:GENBANK-ID:AF033861|acc:AF033861.1 mRNA from Homo sapiens (Homo sapiens type III adenylyl cyclase (AC-III) mRNA, complete cds) (E=0.0).

[0163] A disclosed NOV5 polypeptide (SEQ ID NO: 22) encoded by SEQ ID NO: 21 is 761 amino acid residues and is presented using the one-letter code in Table 5B. Signal P, Psort and/or Hydropathy results predict that NOV5 has no signal peptide and is likely to be localized in the plasma membrane with a certainty of 0.6000. In other embodiments, NOV5 may also be localized to the Golgi body with acertainty of 0.4000, the endoplasmic reticulum with a certainty of 0.3000, or the mitochondrial inner membrane with a certainty of 0.0300.

TABLE 5B
Encoded NOV5 protein sequence (SEQ ID NO:22)

MPRNQGFSEPEYSAEYSAEYSVSLPSDPDRGVGRTHEISVRNSGSCLCLP
RFMRRGSAGSSPRARRALPPQPARGPSRSTRWPSSRTVLADQCYLCSGNP
LCVPAGGGLPFAPDKKRPSALPRSQRALRGGPVQSSSSKSSSPALIETKE
PNGSAHSSGSTSEKPEEQDAQADNPSFPNPRRRLRLQDLADRVVDASEDE
HELNQLLNEALLERESAQVVKKRNTFLLSMRFMDPEMETRYSVEKEKQSG
AAFSCSCVVLLCTALVEILIDPWLMTNYVTFMVGEILLLILTICSLAAIF
PRAFPKKLVAFSTWIDRTRWARNTWAMLAIFILVMANVVDMLSCLQYYTG
PSNATAGMETEGSCLENPKYYNYVAVLSLIATIMLVQVSHMVKLTLMLLV
AGAVATINLYAWRPVFDEYDHKRFREHDLPMVALEQMQGFNPGLNGTDRL
PLVPSKYSMTVMVFLMMLSFYYFSRHVEKLARTLFLWKIEVHDQKERVYE
MRRWNEALVTNMLPEHVARHFLGSKKRDEELYSQTYDEIGVMFASLPNFA
DFYTEESINNGGIECLRFLNEIISDFDSLLDNPKFRVITKIKTIGSTYMA
ASGVTPDVNTNGFASSNKEDKSERERWQHLADLADFALAMKDTLTNINNQ
SFNNFMLRIGMNKGGVLAGVIGARKPHYDIWGNTVNVASRMESTGVMGNI
QVVEETQVILREYGFRFVRRGPIFVKGKGELLTFFLKGRDKLATFPNGPS
VTLPHQVVDNS

[0164] The disclosed NOV5 amino acid sequence has 628 of 641 amino acid residues (97%) identical to, and 632 of 641 amino acid residues (98%) similar to, the 1144 amino acid residue ptnr:SPTREMBL-ACC:060266 protein from Homo sapiens (Human) (Type III ADENYLYL Cyclase (KIAA0511 Protein)) (E=0.0).

[0165] NOV5 is expressed in at least adrenal gland, bone marrow, brain—amygdala, brain—cerebellum, brain—hippocampus, brain—substantia nigra, brain—thalamus, brain—whole, fetal brain, fetal kidney, fetal liver, fetal lung, heart, kidney, lymphoma—Raji, mammary gland, pancreas, pituitary gland, placenta, prostate, salivary gland, skeletal muscle, small intestine, spinal cord, spleen, stomach, testis, thyroid, trachea, uterus. This information was derived by determining the tissue sources of the sequences that were included in the invention including but not limited to SeqCalling sources, Public EST sources, and/or RACE sources.

[0166] In addition, the sequence is predicted to be expressed in human islet, brain, liver, and lung because of the expression pattern of (GENBANK-ID: gb:GENBANK-ID:AF033861|acc:AF033861.1) a closely related Homo sapiens type III adenylyl cyclase (AC-III) mRNA, complete cds homolog.

[0167] NOV5 also has homology to the amino acid sequences shown in the BLASTP data listed in Table 5C.

TABLE 5C
BLAST results for NOV5

| Gene Index/ | | Length | Identity | Positives | |
|---|---|---|---|---|---|
| Identifier | Protein/Organism | (aa) | (%) | (%) | Expect |
| gi\|117787\|sp\|P21932\| | ADENYLATE CYCLASE | 1144 | 549/648 | 574/648 | 0.0 |
| CYA3_RAT | TYPE III | | (84%) | (87%) | |
| | (ADENYLATE | | | | |
| | CYCLASE, | | | | |
| | OLFACTIVE TYPE) | | | | |
| | (ATP | | | | |
| | PYROPHOSPHATELYASE) | | | | |
| | (ADENYLYL | | | | |
| | CYCLASE) (AC-III) | | | | |
| | (AC3) | | | | |
| gi\|4757724\|ref\|NP_{—} | adenylate cyclase | 1144 | 588/619 | 588/619 | 0.0 |
| 004027.1\| | 3; adenylyl | | (94%) | (94%) | |
| (NM_004036) | cyclase, type III; | | | | |
| | ATP | | | | |
| | pyrophosphatelyase | | | | |
| | [Homo sapiens] | | | | |
| gi\|7437177\|pir\| | adenylate cyclase | 1167 | 216/574 | 324/574 | 4e−99 |
| \|T13927 | (EC 4.6.1.1) | | (37%) | (55%) | |
| | isoform 39E - | | | | |
| | fruit fly | | | | |
| | (Drosophila melanogaster) | | | | |
| gi\|7302124\|gb\| | Ac3 gene product | 1167 | 216/574 | 324/574 | 5e−99 |
| AAF57223.1\| | [Drosophila melanogaster] | | (37%) | (55%) | |
| (AE003781) | | | | | |
| gi\|6752978\|ref\|NP_{—} | adenylate cyclase | 1249 | 199/536 | 307/536 | 3e−91 |
| 033753.1\| | 8 [Mus musculus] | | (37%) | (57%) | |
| (NM_009623) | | | | | |

[0168] The homology of these sequences is shown graphically in the ClustalW analysis shown in Table 5D.

[image]

[image]

[image]

[0169] Tables 5E-F list the domain description from DOMAIN analysis results against NOV5. This indicates that the NOV5 sequence has properties similar to those of other proteins known to contain this domain.

TABLE 5E
Domain Analysis of NOV5

gnl|Pfam|pfam00211, guanylate_cyc, Adenylate and Guanylate cyclase
catalytic domain. (SEQ ID NO:90)
CD-Length=185 residues, 100.0% aligned
Score=204 bits (518), Expect=2e−53

| | | | |
|---|---|---|---|
| Query: | 531 | LYSQTYDEIGVMFASLPNFADFYTEESINNGGIECLRFLNEIISDFDSLLDNPKFRVITK | 590 |
| | | +\|++ \|\|\|+ ++\|\| + \| \| \| +\| \|\|\|+ + \|\| \|+\| \| | |
| Sbjct: | 1 | VYAERYDEVTILFADIVGFTALSERHSP----EEVVRLLNELFTRFDELVDAHG---GYK | 53 |
| Query: | 591 | IKTIGSTYMAASGVTPDVNTNGFASSNKEDKSERERWQHLADLADFALAMKDTLTNINNQ | 650 |
| | | +\|\|\|\| \|\|\|\|\|\|+ \| \| \| \|\|\|\|\|\|\|\| + \| +\| | |
| Sbjct: | 54 | VKTIGDAYMAASGLPPA------------------SAAHAAKLADFALAMVEALEEVNVG | 95 |
| Query: | 651 | SFNNFMLRIGMNKGGVLAGVIGARKPHYDIWGNTVNVASRMESTGVMGNIQVVEETQVIL | 710 |
| | | \|\|\|\|++ \| \|+\|\|\|\|\|\|++\| \|\|+\|\|+\|\|\|\|\|\|\|\|\|\| \|\| \| \| \| \| \| +\| | |
| Sbjct: | 96 | HTEPLRLRIGIHTGPVVAGVIGAKRPRYDVWGDTVNVASRMESLGPGKIHVSESTYRLL | 155 |
| Query: | 711 | -REYGFRF-VRRGPIFVKGKGE-LLTFFLK | 737 |
| | | \|+\| \|\| + \|\|\|\|\|+ + \|+\|\| | |
| Sbjct: | 156 | NGLESFQFRFPRGEVSVKGKGKPMKTYFLH | 185 |

[0170] TABLE 5F
Domain Analysis of NOV5

gnl|Smart|smart00044, CYCc, Adenylyl-/guanylyl cyclase, catalytic
domain; Present in two copies in mammalian adenylyl cyclases.
Eubacterial homologues are known. Two residues (Asn, Arg) are thought
to be involved in catalysis. These cyclases have important roles in a
diverse range of cellular processes. (SEQ ID NO:91)
CD-Length=194 residues, 99.5% aligned
Score=174 bits (442), Expect=1e−44

| | | | |
|---|---|---|---|
| Query: | 500 | EMRRWNEALVTNMLPEHVARHFLGSKKRDEELYSQTYDEIGVMFASLPNFADFYTEESIN | 559 |
| | | \| +\| \|+ \|+ + \|\| \|\| \| + + +\|\|\|+ ++\| + \| + | |
| Sbjct: | 1 | EEKRKNDRLLDQLLPASVAESLKRGG---EPVPAPSYDEVTILFTDIVGFTALSSA---- | 53 |
| Query: | 560 | NGGIECLRFLNEIISDFDSLLDNPKFRVITKIKTIGSTYMAASGVTPDVNTNGFASSNKE | 619 |
| | | + + \|\|++ \| \|\| ++\| \|+\|\|\|\| \|\| \|\|+ | |
| Sbjct: | 54 | ATPEQVVTLLNDLYSRFDRIIDRHG---GYKVKTIGDAYMVVSGLPTAAL---------- | 100 |
| Query: | 620 | DKSERERWQHLADLADFALAMKDTLTNINNQ-SFNNFMLRIGMNKGGVLAGVIGARKPHY | 678 |
| | | \|\| \| \|\| \| ++\| + \| \| +\|\|\|++ \| \|+\|\|\|+\| \| \| | |
| Sbjct: | 101 | -------VQHAELAALEALDMVESLKTVLVQHRGNGLRVRIGIHTGPVVAGVVGITMPRY | 153 |
| Query: | 679 | DIWGNTVNVASRMESTGVMGNIQVVEETQVILREYGFRFV | 718 |
| | | ++\|+\|\|\|+\|\|\|\|\|\| \| \| \|\|\| \|\|\| +\|\| +\| | |
| Sbjct: | 154 | CLFGDTVNLASRMESVGDPGQIQVSEETYSLLRRRSGQFE | 193 |

[0171] Adenylyl cyclase (AC) is an enzyme that synthesizes cyclic adenosine monophosphate or cyclic AMP from adenosine triphosphate (ATP), an important player of some intracellular signaling pathways. Adenylyl cyclases are integral membrane proteins that consist of two bundles of six transmembrane segments and two catalytic domains extending as loops into the cytoplasm. There are at least nine isoforms of adenylyl cyclase, based on cloning of full-length cDNAs. These enzymes differ considerably in regulatory properties and are differentially expressed among tissues. Recently, type 3 adenylyl cyclase (AC-III) overexpression has been implicated in reversing the defect of spontaneous diabetics in Goto-Kakizaki (GK) rat. More recently, cDNA of the human AC-III homologue has been cloned with an open reading frame encoding 1144 amino acids containing 12 transmembrane-spanning domains. Human AC-III gene shows 95% homology with the rat sequence and is widely expressed in different tissues (Busfield et al., 2000, Genomics vol. 66: 213-216; Yang et al., 1999, Biochem Biophy Res commun, vol. 254: 548-551).

[0172] The disclosed NOV5 nucleic acid of the invention encoding a Type m adenylyl cyclase-like protein includes the nucleic acid whose sequence is provided in Table 5A or a fragment thereof. The invention also includes a mutant or variant nucleic acid any of whose bases may be changed from the corresponding base shown in Table 5A while still encoding a protein that maintains its Type III adenylyl cyclase-like activities and physiological functions, or a fragment of such a nucleic acid. The invention further includes nucleic acids whose sequences are complementary to those just described, including nucleic acid fragments that are complementary to any of the nucleic acids just described. The invention additionally includes nucleic acids or nucleic acid fragments, or complements thereto, whose structures include chemical modifications. Such modifications include, by way of nonlimiting example, modified bases, and nucleic acids whose sugar phosphate backbones are modified or derivatized. These modifications are carried out at least in part to enhance the chemical stability of the modified nucleic acid, such that they may be used, for example, as antisense binding nucleic acids in therapeutic applications in a subject. In the mutant or variant nucleic acids, and their complements, up to about 2% percent of the bases may be so changed.

[0173] The disclosed NOV5 protein of the invention includes the Type III adenylyl cyclase-like protein whose sequence is provided in Table 5B. The invention also includes a mutant or variant protein any of whose residues may be changed from the corresponding residue shown in Table 5B while still encoding a protein that maintains its Type III adenylyl cyclase-like activities and physiological functions, or a functional fragment thereof. In the mutant or variant protein, up to about 63% percent of the residues may be so changed.

[0174] The NOV5 nucleic acids and proteins of the invention are useful in potential therapeutic applications implicated in diabetes, heart failure, neurological diseases such as epilepsy, sleep disorder, parkinsonism, Huntington's disease, Alzheimer's disease, depression, schizophrenia, and/or other diseases, disorders and conditions of the like. The NOV5 nucleic acid, or fragments thereof, may further be useful in diagnostic applications, wherein the presence or amount of the nucleic acid or the protein are to be assessed.

[0175] NOV5 nucleic acids and polypeptides are further useful in the generation of antibodies that bind immunospecifically to the novel substances of the invention for use in therapeutic or diagnostic methods. These antibodies may be generated according to methods known in the art, using prediction from hydrophobicity charts, as described in the “Anti-NOVX Antibodies” section below. For example the disclosed NOV5 protein have multiple hydrophilic regions, each of which can be used as an immunogen. In one embodiment, contemplated NOV5 epitope is from about amino acids 5 to 270. In other embodiments, NOV5 epitope is from about amino acids 400 to 450, and from about amino acids 470 to 770. This novel protein also has value in development of powerful assay system for functional analysis of various human disorders, which will help in understanding of pathology of the disease and development of new drug targets for various disorders.

[0176] NOV6

[0177] NOV6 includes three novel Airway Trypsin-Like Protease-like proteins disclosed below. The disclosed sequences have been named NOV6a, NOV6b, and NOV6c.

[0178] NOV6a

[0179] A disclosed NOV6a nucleic acid of 1769 nucleotides (also referred to as CG50389-02) encoding a novel Interleukin 1 receptor related protein-like protein is shown in Table 6A. An open reading frame was identified beginning with an ATG initiation codon at nucleotides 386-388 and ending with a TAG codon at nucleotides 1619-1621. A putative untranslated region upstream from the initiation codon and downstream from the termination codon is underlined in Table 6A, and the start and stop codons are in bold letters.

TABLE 6A
NOV6a Nucleotide Sequence (SEQ ID NO:23)

CGCCCGCCCACGGCGGCGGGGAAATACCTAGGCATGGAAGTGGCATGACA
GGGCTCGTGTCCCTGTCATATTTTCCACTCTCCACGAGGTCCTGCGCGCT
TCAATCCTGCAGGCAGCCCGGTTTGGGGATGTGGTCCTTGCTGCTCTGCG
GGTTGTCCATCGCCCTTCCACTGTCTGTCACAGCAGATGGATGCAAGGAC
ATTTTTATGAAAAATGAGATACTTTCAGCAAGCCAGCCTTTTGCTTTTAA
TTGTACATTCCCTCCCATAACATCTGGGGAAGTCAGTGTAACATGGTATA
AAAATTCTAGCAAAATCCCAGTGTCCAAAATCATACAGTCTAGAATTCAC
CAGGACGAGACTTGGATTTTGTTTCTCCCCATGGAATGGGGGGACTCAGG
AGTCTACCAATGTGTTATAAAGACTGTAACGAGATTAAAGGGGAGCGGTT
CACTGTTTTGGAAACCAGGCTTTTGGTGAGCAATGTCTCGGCAGAGGACA
GAGGGAACTACGCGTGTCAAGCCATACTGACACACTCAGGGAAGCAGTAC
GAGGTTTTAAATGGCATCACTGTGAGCATTACAGAAAGAGCTGGATATGG
AGGAAGTGTCCCTAAAATCATTTATCCAAAAAATCATTCAATTGAAGTAC
AGCTTGGTACCACTCTGATTGTGGACTGCAATGTAACAGACACCAAGGAT
AATACAAATCTACGATGCTGGAGAGTCAATAACACTTTGGTGGATGATTA
CTATGATGAATCCAAACGAATCAGAGAAGGGGTGGAAACCCATGTCTCTT
TTCGGGAACATAATTTGTACACAGTAAACATCACCTTCTTGGAAGTGAAA
ATGGAAGATTATGGCCTTCCTTTCATGTGCCACGCTGGAGTGTCCACAGC
ATACATTATATTACAGCTCCCAGCTCCGGATTTTCGAGCTTACTTGATAG
GAGGGCTTATCGCCTTGGTGGCTGTGGCTGTGTCTGTTGTGTACATATAC
AACATTTTTAAGATCGACATTGTTCTTTGGTATCGAAGTGCCTTCCATTC
TACAGAGACCATAGTAGATGGGAAGCTGTATGACGCCTATGTCTTATACC
CCAAGCCCCACAAGGAAAGCCAGAGGCATGCCGTGGATGCCCTGGTGTTG
AATATCCTGCCCGAGGTGTTGGAGAGACAATGTGGATATAAGTTGTTTAT
ATTCGGCAGAGATGAATTCCCTGGACAAGCCGTGGCCAATGTCATCGATG
AAAACGTTAAGCTGTGCAGGAGGCTGATTGTCATTGTGGTCCCCGAATCG
CTGGGCTTTGGCCTGTTGAAGAACCTGTCAGAAGAACAAATCGCGGTCTA
CAGTGCCCTGATCCAGGACGGGATGAAGGTTATTCTCATTGAGCTGGAGA
AAATCGAGGACTACACAGTCATGCCAGAGTCAATTCAGTACATCAAACAG
AAGCATGGTGCCATCCGGTGGCATGGGGACTTCACGGAGCAGTCACAGTG
TATGAAGACCAAGTTTTGGAAGACAGTGAGATACCACATGCCGCCCAGAA
GGTGTCGGCCGTTTCTCCGGTCCACGTGCCGCAGCACACACCTCTGTACC
GCACCGCAGGCCCAGAACTAGGCTCAAGAAGAAAGAAGTGTACTCTCACG
ACTGGCTAAGACTTGCTGGACTGACACCTATGGCTGGAAGATGACTTGTT
TTGCTCCATGTCTCCTCATTCCTACACCTATTTTCTGCTGCAGGATGAGG
CTAGGGTTAGCATTCTAGA

[0180] The disclosed NOV6a nucleic acid sequence, located on the q12 region of chromosome 2, has 1363 of 1370 bases (99%) identical to a gb:GENBANK-ID:HSU49065|acc:U49065.1 mRNA from Homo sapiens (Human interleukin-1 receptor-related protein mRNA, complete cds) (E=7.0e⁻³⁰¹).

[0181] A disclosed NOV6a polypeptide (SEQ ID NO: 24) encoded by SEQ ID NO: 23 is 411 amino acid residues and is presented using the one-letter amino acid code in Table 6B. Signal P, Psort and/or Hydropathy results predict that NOV6a contains no signal peptide and is likely to be localized in the plasma membrane with a certainty of 0.7300. In other embodiments, NOV6A is also likely to be localized to the endoplasmic reticulum (membrane) with a certainty of 0.2000, or to the mitochondrial inner membrane with a certainty of 0.1000

TABLE 6B
Encoded NOV6a protein sequence (SEQ ID NO:24).

MGGLRSLPMCYKDCNEIKGERFTVLETRLLVSNVSAEDRGNYACQAILTH
SGKQYEVLNGITVSITERAGYGGSVPKIIYPKNHSIEVQLGTTLIVDCNV
TDTKDNTNLRCWRVNNTLVDDYYDESKRIREGVETHVSFREHNLYTVNIT
FLEVKMEDYGLPFMCHAGVSTAYIILQLPAPDFRAYLIGGLIALVAVAVS
VVYIYNIFKIDIVLWYRSAFHSTETIVDGKLYDAYVLYPKPHKESQRHAV
DALVLNILPEVLERQCGYKLFIFGRDEFPGQAVANVIDENVKLCRRLIVI
VVPESLGFGLLKNLSEEQIAVYSALIQDGMKVILIELEKIEDYTVMPESI
QYIKQKHGAIRWHGDFTEQSQCMKTKFWKTVRYHMPPRRCRPFLRSTCRS
THLCTAPQAQN

[0182] The disclosed NOV6a amino acid sequence has 401 of 401 amino acid residues (100%) identical to, and 401 of 401 amino acid residues (100%) similar to, the 562 amino acid residue ptnr:SPTREMBL-ACC:Q13525 protein from Homo sapiens (Human) (Interleukin-1 Receptor-Related Protein) (E=3.8e⁻²¹⁸).

[0183] NOV6a is expressed in at least adrenal gland, bone marrow, brain—amygdala, brain—cerebellum, brain—hippocampus, brain—substantia nigra, brain—thalamus, brain—whole, fetal brain, fetal kidney, fetal liver, fetal lung, heart, kidney, lymphoma—Raji, mammary gland, pancreas, pituitary gland, placenta, prostate, salivary gland, skeletal muscle, small intestine, spinal cord, spleen, stomach, testis, thyroid, trachea, uterus. This information was derived by determining the tissue sources of the sequences that were included in the invention including but not limited to SeqCalling sources, Public EST sources, and/or RACE sources.

[0184] NOV6b

[0185] A disclosed NOV6b nucleic acid of 1827 nucleotides (also referred to as CG50389-03) encoding a novel Interleukin 1 receptor related protein-like protein is shown in Table 6C. An open reading frame was identified beginning with an ATG initiation codon at nucleotides 65-67 and ending with a TAA codon at nucleotides 1715-1717. A putative untranslated region upstream from the initiation codon and downstream from the termination codon is underlined in Table 6C, and the start and stop codons are in bold letters.

TABLE 6C
NOV6b Nucleotide Sequence (SEQ ID NO:25)

GTCATATTTTCCACTCTCCACGAGGTCCTGCGCGCTTCAATCCTGCAGGC
AGCCCGGTTTGGGGATGTGGTCCTTGCTGCTCTGCGGGTTGTCCATCGCC
CTTCCACTGTCTGTCACAGCAGATGGATGCAAGGACATTTTTATGAAAAA
TGAGATACTTTCAGCAAGCCAGCCTTTTGCTTTTAATTGTACATTCCCTC
CCATAACATCTGGGGAAGTCAGTGTAACATGGTATAAAAATTCTAGCAAA
ATCCCAGTGTCCAAAATCATACAGTCTAGAATTCACCAGGACGAGACTTG
GATTTTGTTTCTCCCCATGGAATGGGGGGACTCAGGAGTCTACCAATGTG
TTATAAAGGGTAGAGACAGCTGTCATAGAATACATGTAAACCTAACTGTT
TTTGAAAAACATTGGTGTGACACTTCCATAGGTGGTTTACCAAATTTATC
AGATGAGTACAAGCAAATATTACATCTTGGAAAAGATGATAGTCTCACAT
GTCATCTGCACTTCCCGAAGAGTTGTGTTTTGGGTCCAATAAAGTGGTAT
AAAGACTGTAACGAGATTAAAGGGGAGCGGTTCACTGTTTTGGAAACCAG
GCTTTTGGTGAGCAATGTCTCGGCAGAGGACAGAGGGAACTACGCGTGTC
AAGCCATACTGACACACTCAGGGAAGCAGTACGAGGTTTTAAATGGCATC
ACTGTGAGCATTAGTACCACTCTGATTGTGGACTGCAATGTAACAGACAC
CAAGGATAATACAAATCTACGATGCTGGAGAGTCAATAACACTTTGGTGG
ATGATTACTATGATGAATCCAAACGAATCAGAGAAGGGGTGGAAACCCAT
GTCTCTTTTCGGGAACATAATTTGTACACAGTAAACATCACCTTCTTGGA
AGTGAAAATGGAAGATTATGGCCTTCCTTTCATGTGCCACGCTGGAGTGT
CAACAGCATACATTATATTACAGCTCCCAGCTCCGGATTTTCGAGCTTAC
TTGATAGGAGGGCTTATCGCCTTGGTGGCTGTGGCTGTGTCTGTTGTGTA
CATATACAACATTTTTAAGATCGACATTGTTCTTTGGTATCGAAGTGCCT
TCCATTCTACAGAGACCATAGTAGATGGGAAGCTGTATGACGCCTATGTC
TTATACCCCAAGCCCCACAAGGAAAGCCAGAGGCATGCCGTGGATGCCCT
GGTGTTGAATATCCTGCCCGAGGTGTTGGAGAGACAATGTGGATATAAGT
TGTTTATATTCGGCAGAGATGAATTCCCTGGACAAGCCGTGGCCAATGTC
ATCGATGAAAACGTTAAGCTGTGCAGGAGGCTGATTGTCATTGTGGTCCC
CGAATCGCTGGGCTTTGGCCTGTTGAAGAACCTGTCAGAAGAACAAATCG
CGGTCTACAGTGCCCTGATCCAGGACGGGATGAAGGTTATTCTCGTTGAG
CTGGAGAAAATCGAGGACTACACAGTCATGCCAGAGTCAATTCAGTACAT
CAAACAGAAGCATGGTGCCATCCGGTGGCATGGGGACTTCACGGAGCAGT
CACAGTGTATGAAGACCAAGTTTTGGAAGACAGTGAGATACCACATGCCA
CCCAGAAGGTGTCGGCCGTTTCCTCCGGTCCAGCTGCTGCAGCACACACC
TTGCTGCCGCACCGCAGGCCCAGAACTAGGCTCAAGAAGAAAGAAGTGTA
CTCTCACGACTGGCTAAGACTTGCTGGACTGACACCTATGGCTGGAAGAT
GACTTGTTTTGCTCCATGTCTCCTCATTCCTACACCTATTTTCTGCTGCA
GGATGAGGCTAGGGTTAGCATTCTAGA

[0186] The disclosed NOV6b nucleic acid sequence, located on the p12 region of chromosome 2, has 1118 of 1121 bases (99%) identical to a gb:GENBANK-ID:AF284434|acc:AF284434.1 mRNA from Homo sapiens (Homo sapiens IL-1Rrp2 mRNA, complete cds) (E=0.0).

[0187] A disclosed NOV6b polypeptide (SEQ ID NO: 26) encoded by SEQ ID NO: 25 is 550 amino acid residues and is presented using the one-letter amino acid code in Table 6D. Signal P, Psort and/or Hydropathy results predict that NOV6b contains a signal peptide and is likely to be localized in the plasma membrane with a certainty of 0.4600. In other embodiments, NOV6B is also likely to be localized to the endoplasmic reticulum (membrane) with a certainty of 0.1000, the endoplasmic reticulum (lumen) with a certainty of 0.1000, or extracellularly with a certainty of 0.1000. The most likely cleavage site for NOV6b is between positions 19 and 20: VTA-DG.

TABLE 6D
Encoded NOV6b protein sequence (SEQ ID NO:26).

MWSLLLCGLSTALPLSVTADGCKDIFMKNEILSASQPFAFNCTFPPITSG
EVSVTWYKNSSKIPVSKIIQSRIHQDETWILFLPMEWGDSGVYQCVIKGR
DSCHRIHVNLTVFEKHWCDTSIGGLPNLSDEYKQILHLGKDDSLTCHLHF
PKSCVLGPIKWYKDCNEIKGERFTVLETRLLVSNVSAEDRGNYACQAILT
HSGKQYEVLNGITVSISTTLIVDCNVTDTKDNTNLRCWRVNNTLVDDYYD
ESKRIREGVETHVSFREHNLYTVNITFLEVKMEDYGLPFMCHAGVSTAYI
ILQLPAPDFRAYLIGGLIALVAVAVSVVYIYNIFKIDIVLWYRSAFHSTE
TIVDGKLYDAYVLYPKPHKESQRHAVDALVLNILPEVLERQCGYKLFIFG
RDEFPGQAVANVIDENVKLCRRLIVIVVPESLGFGLLKNLSEEQIAVYSA
LIQDGMKVILVELEKIEDYTVMPESIQYIKQKHGAIRWHGDFTEQSQCMK
TKFWKTVRYHMPPRRCRPFPPVQLLQHTPCCRTAGPELGSRRKKCTLTTG

[0188] The disclosed NOV6b amino acid sequence has 336 of 345 amino acid residues (97%) identical to, and 338 of 345 amino acid residues (97%) similar to, the 575 amino acid residue ptnr:TREMBLNEW-ACC:AAG21368 protein from Homo sapiens (Human) (IL-1RRP2) (E=1.7e⁻³⁰⁴).

[0189] NOV6b is expressed in at least the following tissues: amygdala, brain—cerebellum, brain—hippocampus, brain—substantia nigra, brain—thalamus, brain—whole, fetal brain, fetal kidney, fetal liver, fetal lung, heart, kidney, lymphoma—Raji, mammary gland, pancreas, pituitary gland, placenta, prostate, salivary gland, skeletal muscle, small intestine, spinal cord, spleen, stomach, testis, thyroid, trachea and uterus. Expression information was derived from the tissue sources of the sequences that were included in the derivation of the sequence of NOV6b.

[0190] NOV6c

[0191] A disclosed NOV6c nucleic acid of 1897 nucleotides (also referred to as CG50389-04) encoding a novel Interleukin 1 receptor related protein-like protein is shown in Table 6E. An open reading frame was identified beginning with an ATG initiation codon at nucleotides 51-53 and ending with a TAA codon at nucleotides 1785-1787. A putative untranslated region upstream from the initiation codon and downstream from the termination codon is underlined in Table 6E, and the start and stop codons are in bold letters.

TABLE 6E
NOV6c Nucleotide Sequence (SEQ ID NO:27)

GAATTCCGCCCGCCCACGGCGGCGGGGAAATACCTAGGCATGGAAGTGGC
ATGACAGGGCTCGTGTCCCTGTCATATTTTCCACTCTCCACGAGGTCCTG
CGCGCTTCAATCCTGCAGGCAGCCCGGTTTGGGGATGTGGTCCTTGCTGC
TCTGCGGGTTGTCCATCGCCCTTCCACTGTCTGTCACAGCAGATGGATGC
AAGGACATTTTTATGAAAAATGAGATACTTTCAGCAAGCCAGCCTTTTGC
TTTTAATTGTACATTCCCTCCCATAACATCTGGGGAAGTCAGTGTAACAT
GGTATAAAAATTCTAGCAAAATCCCAGTGTCCAAAATCATACAGTCTAGA
ATTCACCAGGACGAGACTTGGATTTTGTTTCTCCCCATGGAATGGGGGGA
CTCAGGAGTCTACCAATGTGTTATAAAGGGTAGAGACAGCTGTCATAGAA
TACATGTAAACCTAACTGTTTTTGAAAAACATTGGTGTGACACTTCCATA
GGTGGTTTACCAAATTTATCAGATGAGTACAAGCAAATATTACATCTTGG
AAAAGATGATAGTCTCACATGTCATCTGCACTTCCCGAAGAGTTGTGTTT
TGGGTCCAATAAAGTGGTATAAAGACTGTAACGAGATTAAAGGGGAGCGG
TTCACTGTTTTGGAAACCAGGCTTTTGGTGAGCAATGTCTCGGCAGAGGA
CAGAGGGAACTACGCGTGTCAAGCCATACTGACACACTCAGGGAAGCAGT
ACGAGGTTTTAAATGGCATCACTGTGAGCATTAGTACCACTCTGATTGTG
GACTGCAATGTAACAGACACCAAGGATAATACAAATCTACGATGCTGGAG
AGTCAATAACACTTTGGTGGATGATTACTATGATGAATCCAAACGAATCA
GAGAAGGGGTGGAAACCCATGTCTCTTTTCGGGAACATAATTTGTACACA
GTAAACATCACCTTCTTGGAAGTGAAAATGGAAGATTATGGCCTTCCTTT
CATGTGCCACGCTGGAGTGTCAACAGCATACATTATATTACAGCTCCCAG
CTCCGGATTTTCGAGCTTACTTGATAGGAGGGCTTATCGCCTTGGTGGCT
GTGGCTGTGTCTGTTGTGTACATATACAACATTTTTAAGATCGACATTGT
TCTTTGGTATCGAAGTGCCTTCCATTCTACAGAGACCATAGTAGATGGGA
AGCTGTATGACGCCTATGTCTTATACCCCAAGCCCCACAAGGAAAGCCAG
AGGCATGCCGTGGATGCCCTGGTGTTGAATATCCTGCCCGAGGTGTTGGA
GAGACAATGTGGATATAAGTTGTTTATATTCGGCAGAGATGAATTCCCTG
GACAAGCCGTGGCCAATGTCATCGATGAAAACGTTAAGCTGTGCAGGAGG
CTGATTGTCATTGTGGTCCCCGAATCGCTGGGCTTTGGCCTGTTGAAGAA
CCTGTCAGAAGAACAAATCGCGGTCTACAGTGCCCTGATCCAGGACGGGA
TGAAGGTTATTCTCGTTGAGCTGGAGAAAATCGAGGACTACACAGTCATG
CCAGAGTCAATTCAGTACATCAAACAGAAGCATGGTGCCATCCGGTGGCA
TGGGGACTTCACGGAGCAGTCACAGTGTATGAAGACCAAGTTTTGGAAGA
CAGTGAGATACCACATGCCACCCAGAAGGTGTCGGCCGTTTCCTCCGGTC
CAGCTGCTGCAGCACACACCTTGCTGCCGCACCGCAGGCCCAGAACTAGG
CTCAAGAAGAAAGAAGTGTACTCTCACGACTGGCTAAGACTTGCTGGACT
GACACCTATGGCTGGAAGATGACTTGTTTTGCTCCATGTCTCCTCATTCC
TACACCTATTTTCTGCTGCAGGATGAGGCTAGGGTTAGCATTCTAGA

[0192] The disclosed NOV6c nucleic acid sequence, located on the p12 region of chromosome 2, has 1118 of 1121 bases (99%) identical to a gb:GENBANK-ID:AF284434|acc:AF284434.1 mRNA from Homo sapiens (Homo sapiens IL-1Rrp2 mRNA, complete cds) (E=0.0).

[0193] A disclosed NOV6c polypeptide (SEQ ID NO: 28) encoded by SEQ ID NO: 27 is 578 amino acid residues and is presented using the one-letter amino acid code in Table 6F. Signal P, Psort and/or Hydropathy results predict that NOV6c contains a signal peptide and is likely to be localized in the mitochondrial inner membrane with a certainty of 0.8546. In other embodiments, NOV6c is also likely to be localized to the plasma membrane with a certainty of 0.6000, the Golgi body with a certainty of 0.4000, or in the mitochondrial inner membrane space with a certainty of 0.3386. The most likely cleavage site for NOV6c is between positions 47 and 48: VTA-DG.

TABLE 6F
Encoded NOV6c protein sequence (SEQ ID NO:28).

MTGLVSLSYFPLSTRSCALQSCRQPGLGMWSLLLCGLSTALPLSVTADGC
KDIFMKNEILSASQPFAFNCTFPPITSGEVSVTWYKNSSKIPVSKIIQSR
IHQDETWILFLPMEWGDSGVYQCVIKGRDSCHRIHVNLTVFEKHWCDTSI
GGLPNLSDEYKQILHLGKDDSLTCHLHFPKSCVLGPIKWYKDCNEIKGER
FTVLETRLLVSNVSAEDRGNYACQAILTHSGKQYEVLNGITVSISTTLIV
DCNVTDTKDNTNLRCWRVNNTLVDDYYDESKRIREGVETHVSFREHNLYT
VNITFLEVKMEDYGLPFMCHAGVSTAYIILQLPAPDFRAYLIGGLIALVA
VAVSVVYIYNIFKIDIVLWYRSAFHSTETIVDGKLYDAYVLYPKPHKESQ
RHAVDALVLNILPEVLERQCGYKLFIFGRDEFPGQAVANVIDENVKLCRR
LIVIVVPESLGFGLLKNLSEEQIAVYSALIQDGMKVILVELEKIEDYTVM
PESIQYIKQKHGAIRWHGDFTEQSQCMKTKFWKTVRYHMPPRRCRPFPPV
QLLQHTPCCRTAGPELGSRRKKCTLTTG

[0194] The disclosed NOV6c amino acid sequence has 336 of 345 amino acid residues (97%) identical to, and 338 of 345 amino acid residues (97%) similar to, the 575 amino acid residue ptnr:TREMBLNEW-ACC:AAG21368 protein from Homo sapiens (Human) (IL-IRRP2) (E=1.7e⁻³⁰⁴).

[0195] NOV6c is expressed in at least the following tissues: adrenal gland, bone marrow, brain—amygdala, brain—cerebellum, brain—hippocampus, brain—substantia nigra, brain—thalamus, brain—whole, fetal brain, fetal kidney, fetal liver, fetal lung, heart, kidney, lymphoma—Raji, mammary gland, pancreas, pituitary gland, placenta, prostate, salivary gland, skeletal muscle, small intestine, spinal cord, spleen, stomach, testis, thyroid, trachea and uterus. Expression information was derived from the tissue sources of the sequences that were included in the derivation of the sequence of NOV6c.

[0196] NOV6a also has homology to the amino acid sequences shown in the BLASTP data listed in Table 6G.

TABLE 6G
BLAST results for NOV6a

| Gene Index/ | | Length | Identity | Positives | |
|---|---|---|---|---|---|
| Identifier | Protein/Organism | (aa) | (%) | (%) | Expect |
| gi\|4504663\|ref\|NP_{—} | interleukin 1 | 562 | 382/401 | 382/401 | 0.0 |
| 003845.1\| | receptor-like 2 | | (95%) | (95%) | |
| (NM_003854) | [Homo sapiens] | | | | |
| gi\|13637728\|ref\|XP_{—} | similar to IL-1Rrp2 | 603 | 356/375 | 356/375 | 0.0 |
| 002685.3\| | (H. sapiens) | | (94%) | (94%) | |
| (XM_002685) | [Homo sapiens] | | | | |
| gi\|10644686\|gb\| | IL-1Rrp2 | 575 | 355/375 | 356/375 | 0.0 |
| AAG21368.1\| | [Homo sapiens] | | (94%) | (94%) | |
| AF284434_1 | | | | | |
| (AF284434) | | | | | |
| gi\|1236081\|gb\| | interleukin-1 | 561 | 262/380 | 304/380 | e−155 |
| AAB53238.1\| | receptor-related | | (68%) | (79%) | |
| (U49066) | protein | | | | |
| | [Rattus norvegicus] | | | | |
| gi\|10644684\|gb\| | IL-1Rrp2 [Mus musculus] | 574 | 262/380 | 301/380 | e−153 |
| AAG21367.1\| | | | (68%) | (78%) | |
| AF284433_1 | | | | | |
| (AF284433) | | | | | |

[0197] The homology of these sequences is shown graphically in the ClustalW analysis shown in Table 6H.

[image]

[image]

[image]

[0198] Tables 61-J list the domain description from DOMAIN analysis results against NOV6. This indicates that the NOV6 sequence has properties similar to those of other proteins known to contain this domain.

TABLE 61
Domain Analysis of NOV6
gnl|Pfam|pfam01582, TIR, TIR domain. The TIR domain is an
intracellular signaling domain found in MyD88, interleuicin 1 receptor
and the Toll receptor. Called TIR (by SMART?) for Toll - Interleukin -
Resistance. (SEQ ID NO:97)
CD-Length = 141 residues, 100.0% aligned
Score = 128 bits (322), Expect = 6e−31

| | | | |
|---|---|---|---|
| Query: | 234 | AYVLYPKPHKESQRHAVDALVLNILPEVLERQCGYKLFIFGRDEFPGQAVANVIDENVKL | 293 |
| | | \|++ + \| \| ++\| \| \|\| + \| \|\|\|\| \|\|\| \|\|+++ + \| ++ | |
| Sbjct: | 1 | AFISFSGKDDR------DTFVSHLLKE-LEEKPGIKLFIDDRDELPGESILENLFEAIEK | 53 |
| Query: | 294 | CRRLIVIVVPESLGFGLLKNLSEEQIAVYSALIQDGMKVILIELEKIEDYTVMPESIQYI | 353 |
| | | \|\| \|\|\|+ \| \| \|\| \|\| \| \|\|\|\| \|++ \| +\| ++ | |
| Sbjct: | 54 | SRRAIVILSSNYASSSW--CLDELVEAVKLALEQGNKKVILPEFYKVDPSDVRKQSGKFG | 111 |
| Query: | 354 | KQKHGAIRWHGDFTEQSQCMRTKFWKTVRYHMPP 387 | |
| | | \| ++\| \|\| \| \| + +\|\|\| \| \|\| | |
| Sbjct: | 112 | KAFLKTLKWFGDKTSQ----RIRFWKKALYAMPV 141 | |

[0199] TABLE 6J
Domain Analysis of NOV6
gnl|Smart|smart00255, TIR, Toll - interleukin 1 - resistance (SEQ ID NO:98)
CD-Length = 140 residues, 99.3% aligned
Score = 102 bits (254), Expect = 4e−23

| | | | |
|---|---|---|---|
| Query: | 232 | YDAYVLYPKPHKESQRHAVDALVLNILPEVLERQCGYKLFIFGRDEFPGQAVANVIDENV | 291 |
| | | \|\| ++ \| + + \| +\|\|+ \|\|\|\| +\| \| \|\| \|\|\| + | |
| Sbjct: | 2 | YDVFISYSG---------DEDVRNEFLSHLLEQLRGYKLCVFIDDFEPGGGDLENIDEAI | 52 |
| Query: | 292 | KLCRRLIVIVVPESLGFGLLKNLSEEQIAVYSALIQDGMKVILIELEKI-EDYTVMPESI | 350 |
| | | + \| \|\|++ \| + \| \|+ +\|\| \| \|++\|\| \| \| \| \| \| \| | |
| Sbjct: | 53 | EKSRIAIVVLSPNYAESEWCLD--ELVAALENALEQGGLRVIPIFYEVIPSDVRKQPGSF | 110 |
| Query: | 351 | QYIKQKHGAIRWHGDFTEQSQCMKTKFWKTVRYHMPPR 388 | |
| | | + + +\|+ ++\| \| ++ \|\|\| \| +\| + | |
| Sbjct: | 111 | RKVFKKN-YLKWTEDEKDR-------FWKKALYAVPSK 140 | |

[0200] Interleukin-1 (IL-1) is a central regulator of the immune and inflammatory responses. Recently, a family of proteins have been described that share significant homology in their signaling domains with the Type I IL-1receptor (IL-1RI), which includes the IL-1receptor-related protein. The members of IL-1RI are clustered within 450 kb on human chromosome 2q and all of them are important in host responses to injury and infection. The remarkable conservation between diverse species indicates that the IL-1system represents an ancient signaling machine critical for responses to environmental stresses and attack by pathogens (O'Neill L. A., Greene, C., 1998, J. Leukoc Biol., vol. 63: 650-657, Busfield et al., 2000, Genomics vol. 66:213-216).

[0201] The disclosed NOV6 nucleic acid of the invention encoding a Interleukin 1 receptor related protein-like protein includes the nucleic acid whose sequence is provided in Table 6A, 6C, 6E or a fragment thereof. The invention also includes a mutant or variant nucleic acid any of whose bases may be changed from the corresponding base shown in Table 6A, 6C, or 6E while still encoding a protein that maintains its Interleukin 1 receptor related protein-like activities and physiological functions, or a fragment of such a nucleic acid. The invention further includes nucleic acids whose sequences are complementary to those just described, including nucleic acid fragments that are complementary to any of the nucleic acids just described. The invention additionally includes nucleic acids or nucleic acid fragments, or complements thereto, whose structures include chemical modifications. Such modifications include, by way of nonlimiting example, modified bases, and nucleic acids whose sugar phosphate backbones are modified or derivatized. These modifications are carried out at least in part to enhance the chemical stability of the modified nucleic acid, such that they may be used, for example, as antisense binding nucleic acids in therapeutic applications in a subject. In the mutant or variant nucleic acids, and their complements, up to about 1% percent of the bases may be so changed.

[0202] The disclosed NOV6 protein of the invention includes the Interleukin 1 receptor related protein-like protein whose sequence is provided in Table 6B, 6D, or 6F. The invention also includes a mutant or variant protein any of whose residues may be changed from the corresponding residue shown in Table 6B, 6D, or 6F while still encoding a protein that maintains its Interleukin 1 receptor related protein-like activities and physiological functions, or a functional fragment thereof. In the mutant or variant protein, up to about 32% percent of the residues may be so changed.

[0203] The above defined information for this invention suggests that these Interleukin 1 receptor related protein-like proteins (NOV6) may function as a member of a “Interleukin 1 receptor related protein family”. Therefore, the NOV6 nucleic acids and proteins identified here may be useful in potential therapeutic applications implicated in (but not limited to) various pathologies and disorders as indicated below. The potential therapeutic applications for this invention include, but are not limited to: protein therapeutic, small molecule drug target, antibody target (therapeutic, diagnostic, drug targeting/cytotoxic antibody), diagnostic and/or prognostic marker, gene therapy (gene delivery/gene ablation), research tools, tissue regeneration in vivo and in vitro of all tissues and cell types composing (but not limited to) those. defined here.

[0204] The nucleic acids and proteins of NOV6 are useful in any inflammatory diseases such as uveitis and corneal fibroblast proliferation, allergic encephalomyelitis, amyotrophic lateral sclerosis, acute pancreatitis, cerebral cryptococcosis, autoimmune disease including Type 1 diabetes mellitus (DM), experimental allergic encephalomyelitis (EAE), systemic lupus erythematosus (SLE), colitis, thyroiditis and various forms of arthritis, cancer such as AML, bacterial infections, and/or other pathologies and disorders.

[0205] NOV6 nucleic acids and polypeptides are further useful in the generation of antibodies that bind immunospecifically to the novel substances of the invention for use in therapeutic or diagnostic methods. These antibodies may be generated according to methods known in the art, using prediction from hydrophobicity charts, as described in the “Anti-NOVX Antibodies” section below. For example the disclosed NOV6 protein have multiple hydrophilic regions, each of which can be used as an immunogen. In one embodiment, contemplated NOV6 epitope is from about amino acids 80 to 150. In other embodiments, NOV6 epitope is from about amino acids 200 to 250, or from about amino acids 330 to 420. This novel protein also has value in development of powerful assay system for functional analysis of various human, disorders, which will help in understanding of pathology of the disease and development of new drug targets for various disorders.

[0206] NOV7

[0207] A disclosed NOV7 nucleic acid of 1769 nucleotides (also referred to CG50389-01) encoding a novel Interleukin 1 receptor related protein-like protein is shown in Table 7A. An open reading frame was identified beginning with an ATG initiation codon at nucleotides 45-47 and ending with a TGA codon at nucleotides 477-479. In Table 7A, the 5′ and 3′ untranslated regions are underlined and the start and stop codons are in bold letters.

TABLE 7A
NOV7 Nucleotide Sequence

(SEQ ID NO:29)

CGCCCGCCCACGGCGGCGGGGAAATACCTAGGCATGGAAGTGGCATGACAGGGCTCGTGTCCCTGTCATAT
TTTCCACTCTCCACGAGGTCCTGCGCGCTTCAATCCTGCAGGCAGCCCGGTTTGGGGATGTGGTCCTTGCT
GCTCTGCGGGTTGTCCACGCCCTTCCACTGTCTGTCACAGCAGATGGATGCAAGGACATTTTTATGAAAAA
ATGAGATACTTTCAGCAAGCCAGCCTTTTGCTTTTAATTGTACATTCCCTCCCATAACATCTGGGGAAGTC
AGTGTAACATGGTATAAAAATTCTAGCAAAATCCCAGTGTCCAAAATCATACAGTCTAGAATTCACCAGGA
CGAGACTTGGATTTTGTTTCTCCCCATGGAATGGGGGGACTCAGGAGTCTACCAATGTGTTATAAAGACTG
TAACGAGATTAAAGGGGAGCGGTTCACTGTTTTGGAAACCAGGCTTTTGGTGAGCAATGTCTCGGCAGAGG
ACAGAGGGAACTACGCGTGTCAAGCCATACTGACACACTCAGGGAAGCAGTACGAGGTTTTAAATGGCATC
ACTGTGAGCATTACAGAAAGAGCTGGATATGGAGGAAGTGTCCCTAAAATCATTTATCCAAAAAATCATTC
AATTGAAGTACAGCTTGGTACCACTCTGATTGTGGACTGCAATGTAACAGACACCAAGGATAATACAAATC
TACGATGCTGGAGAGTCAATAACACTTTGGTGGATGATTACTATGATGAATCCAAACGAATCAGAGAAGGG
GTGGAAACCCATGTCTCTTTTCGGGAACATAATTTGTACACAGTAAACATCACCTTCTTGGAAGTGAAAAT
GGAAGATTATGGCCTTCCTTTCATGTGCCACGCTGGAGTGTCCACAGCATACATTATATTACAGCTCCCAG
CTCCGGATTTTCGAGCTTACTTGATAGGAGGGCTTATCGCCTTGGTGGCTGTGGCTGTGTCTGTTGTGTAC
ATATACAACATTTTTAAGATCGACATTGTTCTTTGGTATCGAAGTGCCTTCCATTCTACAGAGACCATAGT
AGATGGGAAGCTGTATGACGCCTATGTCTTATACCCCAAGCCCCACAAGGAAAGCCAGAGGCATGCCGTGG
ATGCCCTGGTGTTGAATATCCTGCCCGAGGTGTTGGAGAGACAATGTGGATATAAGTTGTTTATATTCGGC
AGAGATGAATTCCCTGGACAAGCCGTGGCCAATGTCATCGATGAAAACGTTAAGCTGTGCAGGAGGCTGAT
TGTCATTGTGGTCCCCGAATCGCTGGGCTTTGGCCTGTTGAAGAACCTGTCAGAAGAACAAATCGCGGTCT
ACAGTGCCCTGATCCAGGACGGGATGAAGGTTATTCTCATTGAGCTGGAGAAAATCGAGGACTACACAGTC
ATGCCAGAGTCAATTCAGTACATCAAACAGAAGCATGGTGCCATCCGGTGGCATGGGGACTTCACGGAGCA
GTCACAGTGTATGAAGACCAAGTTTTGGAAGACAGTGAGATACCACATGCCGCCCAGAAGGTGTCGGCCGT
TTCTCCGGTCCACGTGCCGCAGCACACACCTCTGTACCGCACCGCAGGCCCAGAACTAGGCTCAAGAAGAA
AGAAGTGTACTCTCACGACTGGCTAAGACTTGCTGGACTGACACCTATGGCTGGAAGATGACCTGTTTTGC
TCCATGTCTCCTCATTCCTACACCTATTTTCTGCTGCAGGATGAGGCTAGGGTTAGCATTCTAGA

[0208] The disclosed NOV7 nucleic acid sequence, localized to the q12 region of chromosome 2, has 1363 of 1370 bases (99%) identical to a gb:GENBANK-ID:HSU49065|acc:U49065.1 mRNA from Homo sapiens (Human interleukin-1 receptor-related protein mRNA, complete cds) (E=7.0e⁻³⁰¹).

[0209] A disclosed NOV7 polypeptide (SEQ ID NO: 30) encoded by SEQ ID NO: 29 is 144 amino acid residues and is presented using the one-letter amino acid code in Table 7B. Signal P, Psort and/or Hydropathy results predict that NOV7 has a signal peptide and is likely to be localized in the plasma membrane with a certainty of 0.6500. In other embodiments, NOV7 is also likely to be localized to the microbody (peroxisome) with a certainty of 0.6400, to the mitochondrial inner membrane with a certainty of 0.5762, or the mitochondrial intermembrane space with a certainty of 0.3386. The most likely cleavage site for a NOV7 peptide is between amino acids 47 and 48, at: VTA-DG.

TABLE 7B
Encoded NOV7 protein sequence.

(SEQ ID NO:30)

MTGLVSLSYFPLSTRSCALQSCRQPGLGMWSLLLCGLSIALPLSVTADGCKDIFMKNEILSASQPFAFNCT
FPPITSGEVSVTWYKNSSKIPVSKIIQSRIHQDETWILFLPMEWGDSGVYQCVIKTVTRLKGSGSLFWKPG
FW

[0210] The disclosed NOV7 amino acid sequence has 129 of 144 amino acid residues (99%) identical to 129 of 563 amino acid residues gb:GENBANK-ID:HSU49065|acc:U49065.1 protein from Homo sapiens (Human interleukin-1 receptor-related protein mRNA, complete cds).

[0211] NOV7 also has homology to the amino acid sequence shown in the BLASTP data listed in Table 7C.

TABLE 7C
BLAST results for NOV7

| Gene Index/ | | Length | Identity | Positives | |
|---|---|---|---|---|---|
| Identifier | Protein/Organism | (aa) | (%) | (%) | Expect |
| gi\|13637728\|ref\|XP_{—} | similar to IL- | 603 | 126/126 | 126/126 | 3e−72 |
| 002685.3\| | 1Rrp2 (H. sapiens) | | (100%) | (100%) | |
| (XM_002685) | [Homo sapiens] | | | | |
| gi\|4504663\|ref\|NP_{—} | interleukin 1 | 562 | 98/98 | 98/98 | 5e−55 |
| 003845.1\|(NM_{—} | receptor-like 2 | | (100%) | (100%) | |
| 003854) | [Homo sapiens | | | | |
| gi\|10644684\|gb\| | IL-1Rrp2 | 574 | 59/100 | 73/100 | 3e−30 |
| AAG21367.1\| | [Mus musculus] | | (59%) | (73%) | |
| AF284433_1 | | | | | |
| (AF284433) | | | | | |
| gi\|1236081\|gb\| | interleukin-1 | 561 | 54/100 | 73/100 | 4e−29 |
| AAB53238.1\| | receptor-related | | (54%) | (73%) | |
| (U49066) | protein [Rattus norvegicus] | | | | |
| gi\|400047\|sp\|Q02955\| | INTERLEUKIN-1 | 576 | 35/102 | 55/102 | 7e−09 |
| IL1R_RAT | RECEPTOR, TYPE I | | (34%) | (53%) | |
| | PRECURSOR | | | | |
| | (IL-1R-1) (P80) | | | | |

[0212] The homology of these sequences is shown graphically in the ClustalW analysis shown in Table 7D.

[image]

[image]

[0213] Tables 7E-F list the domain description from DOMAIN analysis results against NOV7. This indicates that the NOV7 sequence has properties similar to those of other proteins known to contain this domain.

TABLE 7E
Domain Analysis of NOV7
gnl|Smart|smart00408, IGc2, Immunoglobulin C-2 Type (SEQ ID NO:100)
C-Length = 63 residues, 85.7% aligned
Score = 40.0 bits (92), Expect = 9e−05

| | | | |
|---|---|---|---|
| Query: | 64 | QPFAFNCTFPPITSGEVSVTWYKNSSKIPVSKIIQSRIHQDETWILFLPMEWGDSGVYQC | 123 |
| | | + \| \| ++\|\| \|+ +\| +\|\|+ + + + \|\|\|+\| \| | |
| Sbjct: | 4 | ESVTLTC--PASGDPVPNITWLKDGKPLP-----ESRVVASGSTLTIKNVSLEDSGLYTC | 56 |
| Query: | 124 | V 124 | |
| | | \| | |
| Sbjct: | 57 | V 57 | |

[0214] TABLE 7F
Domain Analysis of NOV7
gnl|Pfam|pfam00047, ig, Immunoglobulin domain. Members of the
immunoglobulin superfamily are found in hundreds of proteins of
different functions. Examples include antibodies, the giant muscle
kinase titin and receptor tyrosine kinases. Immunoglobulin-like
domains may be involved in protein-protein and protein-ligand
interactions. The Pfam alignments do not include the first and last
strand of the imnunoglobulin-like domain. (SEQ ID NO:101)
CD-Length = 68 residues, 97.1% aligned
Score = 36.6 bits (83), Expect = 0.001

| | | | |
|---|---|---|---|
| Query: | 64 | QPFAFNCTFPPITSGEVSVTWYKNSSKIPVSKIIQSRIHQDETW------ILFLPMEWGD | 117 |
| | | + \|+ + +\|\|\| ++ +\| + +\|\|+ + + + \| | |
| Sbjct: | 2 | ESVTLTCSVSG-YPPDPTVTWLRDGKEIELLGSSESRVSSGGRFSISSLSLTISSVTPED | 60 |
| Query: | 118 | SGVYQCV 124 | |
| | | \|\| \| \|\| | |
| Sbjct: | 61 | SGTYTCV 67 | |

[0215] Interleukin-1 (IL-1) is a central regulator of the immune and inflammatory responses. Recently, a family of proteins have been described that share significant homology in their signaling domains with the Type I IL-1receptor (IL-1RI), which includes the IL-1receptor-related protein. The members of IL-1RI are clustered within 450 kb on human chromosome 2q and all of them are important in host responses to injury and infection. The remarkable conservation between diverse species indicates that the IL-1 system represents an ancient signaling machine critical for responses to environmental stresses and attack by pathogens (O'Neill L. A., Greene, C., 1998, J. Leukoc Biol., vol. 63: 650-657, Busfield et al., 2000, Genomics vol. 66:213-216).

[0216] The disclosed NOV7 nucleic acid of the invention encoding a Interleukin 1 receptor related protein-like protein includes the nucleic acid whose sequence is provided in Table 7A or a fragment thereof. The invention also includes a mutant or variant nucleic acid any of whose bases may be changed from the corresponding base shown in Table 7A while still encoding a protein that maintains its Interleukin 1 receptor related protein-like activities and physiological functions, or a fragment of such a nucleic acid. The invention further includes nucleic acids whose sequences are complementary to those just described, including nucleic acid fragments that are complementary to any of the nucleic acids just described. The invention additionally includes nucleic acids or nucleic acid fragments, or complements thereto, whose structures include chemical modifications. Such modifications include, by way of nonlimiting example, modified bases, and nucleic acids whose sugar phosphate backbones are modified or derivatized. These modifications are carried out at least in part to enhance the chemical stability of the modified nucleic acid, such that they may be used, for example, as antisense binding nucleic acids in therapeutic applications in a subject. In the mutant or variant nucleic acids, and their complements, up to about 1% percent of the bases may be so changed.

[0217] The disclosed NOV7 protein of the invention includes the Interleukin 1 receptor related protein-like protein whose sequence is provided in Table 7B. The invention also includes a mutant or variant protein any of whose residues may be changed from the corresponding residue shown in Table 7B while still encoding a protein that maintains its Interleukin 1 receptor related protein-like activities and physiological functions, or a functional fragment thereof. In the mutant or variant protein, up to about 66% percent of the residues may be so changed.

[0218] The protein similarity information, expression pattern, and map location for the Interleukin 1 receptor related protein-like protein and nucleic acid (NOV7) disclosed herein suggest that NOV7 may have important structural and/or physiological functions characteristic of the Interleukin 1 receptor related protein-like family. Therefore, the NOV7 nucleic acids and proteins of the invention are useful in potential diagnostic and therapeutic applications. These include serving as a specific or selective nucleic acid or protein diagnostic and/or prognostic marker, wherein the presence or amount of the nucleic acid or the protein are to be assessed, as well as potential therapeutic applications such as the following: (i) a protein therapeutic, (ii) a small molecule drug target, (iii) an antibody target (therapeutic, diagnostic, drug targeting/cytotoxic antibody), (iv) a nucleic acid useful in gene therapy (gene delivery/gene ablation), and (v) a composition promoting tissue regeneration in vitro and in vivo.

[0219] The NOV7 nucleic acids and proteins of the invention are useful in potential diagnostic and therapeutic applications implicated in various diseases and disorders described below and/or other pathologies. For example, the compositions of the present invention will have efficacy for treatment of patients suffering from uveitis and corneal fibroblast proliferation, allergic encephalomyelitis, amyotrophic lateral sclerosis, acute pancreatitis, cerebral cryptococcosis, autoimmune disease including Type 1 diabetes mellitus (DM), experimental allergic encephalomyelitis (EAE), systemic lupus erythematosus (SLE), colitis, thyroiditis and various forms of arthritis, cancer such as AML, bacterial infectionss, and/or other pathologies/disorders. The NOV7 nucleic acid, or fragments thereof, may further be usefull in diagnostic applications, wherein the presence or amount of the nucleic acid or the protein are to be assessed.

[0220] NOV7 nucleic acids and polypeptides are further useful in the generation of antibodies that bind immunospecifically to the novel substances of the invention for use in therapeutic or diagnostic methods. These antibodies may be generated according to methods known in the art, using prediction from hydrophobicity charts, as described in the “Anti-NOVX Antibodies” section below. For example the disclosed NOV7 protein have multiple hydrophilic regions, each of which can be used as an immunogen. In one embodiment, contemplated NOV7 epitope is from about amino acids 15 to 30. In another embodiment, a contemplated NOV7 epitope is from about amino acids 70 to 135. This novel protein also has value in development of powerful assay system for functional analysis of various human disorders, which will help in understanding of pathology of the disease and development of new drug targets for various disorders.

[0221] NOV8

[0222] A disclosed NOV8 nucleic acid of 954 nucleotides (also referred to as CG50387-02) encoding a novel Connexin GJA3-like protein is shown in Table 8A. An open reading frame was identified beginning with an ATG initiation codon at nucleotides 1-3 and ending with a TGA codon at nucleotides 952-954. A putative untranslated region upstream from the initiation codon is underlined in Table 8A. The start and stop codons are in bold letters.

TABLE 8A
NOV8 nucleotide sequence.

(SEQ ID NO:31)

ATGGGCGACTGGAGCTTTCTGGGAAGACTCTTAGAAAATGCACAGGAGCACTCCACGGTCATCGGCAAGGTT
TGGCTGACCGTGCTGTTCATCTTCCGCATTTTGGTGCTGGGGGCCGCGGCCGAGGACGTGTGCGGCGATGAG
CAGTCAGACTTCACCTGCAACACCCAGCAGCCGGOCTGCGAGAACGTCTGCTACGACAGGGCCTTCCCCATC
TCCCACATCCGCTTCTGGGCGCTGCAGATCATCTTCGTGTCCACGCCCACCCTCATCTACCTGGGCCACGTG
CTGCACATCGTGCGCATGGAGGAGAAGAAGAAAGAGAGGGACGAGGAGGAGCAGCTGAAGAGAGAGAGCCCC
AGCCCCAAGGAGCCACCGCAGGACAATCCCTCGTCGCGGGACGACCGCCGCAGGGTGCGCATCGCCGGCGCG
CTCCTCCCCACCTACCTCTTCAACATCATCTTCAGAGGGTCTTCCACCTCCCCTTCATCCCCCCCCCACTAC
TTTCTGTACGGCTTCGAGCTGAAGCCGCTCTACCGCTGCGACCGCTGGCCCTGCCCCAACACGGTGGACTGC
TTCATCTCCAGGCCCACGGAGAAGACCATCTTCATCATCTTCATGCTGGCGGTGGCCTGCGCGTCACTGCTG
CTCAACATGCTGGAGATATACCACCTGGGCTGGAAGAAGCTCAAGCAGGGCGTGACCAGCCGCCTCGGCCCG
GACGCCTCCGAGGCCCCGCTGGGGACAGCCGATCCCCCGCCCCTGCTGCTGGATGGGAGCGGCAGCAGTCTG
GAGGGGAGCGCCCTGGCAGGGACCCCCGAGGAGGAGGAGCAGGCCGTCACCACCGCCGCCCAGATGCACCAG
CCGCCCTTGCCCCTCGGAGACCCAGGTCGGGCCAGCAAGGCCAGCAGGGCCAGCAGCGGGCGGGCCAGACCG
GAGGACTTGGCCATCTAG

[0223] The NOV8 nucleic acid sequence is located on chromsome 13, has 766 of 766 bases (100%) identical to a gb:GENBANK-ID:AF075290|acc:AF075290.1 mRNA from Homo sapiens (Homo sapiens gap-junction protein alpha 3 (GJA3) gene, complete cds) (E=1.7e⁻²¹⁰)

[0224] The disclosed NOV8 polypeptide (SEQ ID NO: 32) encoded by SEQ ID NO: 31 has 317 amino acid residues and is presented in Table 8B using the one-letter amino acid code. Signal P, Psort and/or Hydropathy results predict that NOV8 has a signal peptide and is likely to be localized to the plasma membrane with a certainty of 0.6000. In other embodiments, NOV8 may also be localized to the Golgi body with a certainty of 0.4000, the endoplasmic reticulum (membrane) with a certainty of 0.3000, or the microbody (peroxisome) with a certainty of 0.3000. The most likely cleavage site for NOV8 is between positions 41 and 42, AAA-ED.

TABLE 8B
Encoded NOV8 protein sequence.

(SEQ lID NO:32)

MGDWSFLGRLLENAQEHSTVIGKVWLTVLFIFRILVLGAAAEDVWGDEQSDFTcNTQQPGCENVCYDRAFPI
SHIRFWALQIIFVSTPTLIYLGHVLMIVRMEEKKKEREEEEQLKRESPSPKEPPQDNPSSRDDRGRVRMAGA
LLRTYVFNIIFKTLFEVGFIAGQYFLYGFELKPLYRCDRWPCPNTVDCFISRPTEKTIFIIFMIAVACASLL
LNMLEIYHLGWKKLKOGVTSRLGPDASEAPLGTADPPPLLLDGSGSSLEGSALAGTPEEEEQAVTTAAQMHQ
PPLPLGDPGRASKASRASSGRARPEDLAI

[0225] A search of sequence databases reveals that the NOV8 amino acid sequence has 255 of 255 amino acid residues (100%) identical to, and 255 of 255 amino acid residues (100%) similar to, the 435 amino acid residue ptnr:TREMBLNEW-ACC:CAC16957 protein from Homo sapiens (Human) (BA264J4.3 (Novel Connexin (Gap Junction Protein)) (E=5.8e⁻¹⁷²).

[0226] NOV8 is expressed in at least adrenal gland, bone marrow, brain—amygdala, brain—cerebellum, brain—hippocampus, brain—substantia nigra, brain—thalamus, brain—whole, fetal brain, fetal kidney, fetal liver, fetal lung, heart, kidney, lymphoma—Raji, mammary gland, pancreas, pituitary gland, placenta, prostate, salivary gland, skeletal muscle, small intestine, spinal cord, spleen, stomach, testis, thyroid, trachea, uterus, lung. This information was derived by determining the tissue sources of the sequences that were included in the invention including but not limited to SeqCalling sources, Public EST sources, Literature sources, and/or RACE sources.

[0227] In addition, the sequence is predicted to be expressed in lens fiber cells because of the expression pattern of (GENBANK-ID: gb:GENBANK-ID:AF075290|acc:AF075290.1) a closely related Homo sapiens gap-junction protein alpha 3 (GJA3) gene, complete cds homolog in species Homo sapiens.

[0228] NOV8 also has homology to the amino acid sequence shown in the BLASTP data listed in Table 8C.

TABLE 8C
BLAST results for NOV8

| Gene Index/ | | Length | Identity | Positives | |
|---|---|---|---|---|---|
| Identifier | Protein/Organism | (aa) | (%) | (%) | Expect |
| gi\|13489110\|ref\|NP_{—} | gap junction | 435 | 233/249 | 233/249 | e−134 |
| 068773.1\| (NM_021954) | protein, alpha 3, | | (93%) | (93%) | |
| | 46kD (connexin46) | | | | |
| | [Homo sapiens] | | | | |
| gi\|14753411\|ref\|XP_{—} | gap junction | 435 | 233/249 | 233/249 | e−134 |
| 051651.1\| (XM_051651) | protein, alpha 3, | | (93%) | (93%) | |
| | 46kD (connexin46) | | | | |
| | [Homo sapiens] | | | | |
| gi\|8393440\|ref\|NP_{—} | gap junction | 417 | 208/256 | 219/256 | e−116 |
| 058671.1\| (NM_016975) | membrane channel | | (81% | (85%) | |
| | protein alpha 3; | | | | |
| | connexin 46; | | | | |
| | alpha 3 connexin | | | | |
| | [Mus musculus | | | | |
| gi\|13242279\|ref\|NP_{—} | connexin 46 | 416 | 207/255 | 218/255 | e−116 |
| 077352.1\| (NM_024376) | [Rattus norvegicus] | | (81%) | (85% | |
| gi\|5919130\|gb\| | connexin 44 | 413 | 202/249 | 214/249 | e−113 |
| AAD56220.1\| | protein [Ovis aries] | | (81%) | (85%) | |
| (AF177912) | | | | | |

[0229] The homology of these sequences is shown graphically in the ClustalW analysis shown in Table 8D.

[image]

[image]

[0230] Tables 8E-F list the domain description from DOMAIN analysis results against NOV8. This indicates that the NOV8 sequence has properties similar to those of other proteins known to contain this domain.

TABLE 8E
Domain Analysis of NOV8

gnl|Pfam|pfam00029, connexin, Connexin. (SEQ ID NO:107)
CD-Length=218 residues, 99.5% aligned
Score=355 bits (912), Expect=2e−99

| | | | |
|---|---|---|---|
| Query: | 3 | DWSFLGRLLENAQEHSTVIGKVWLTVLFIFRILVLGAAAEDVWGDEQSDFTCNTQQPGCE | 62 |
| | | \|\|\|\|\|\|\|\|\| +\|\|\| \|\|\|+\|\|+\|\|\|\|\|\|\|\|\|\|\| \|\|\| \|\|\|\|\|\|\|\|\| \|\|\|\|\|\|\|\|\| | 62 |
| Sbjct: | 2 | DWSFLGRLLEGVNKHSTAIGKIWLSVLFIFRILVLGVAAESVWGDEQSDFVCNTQQPGCE | 61 |
| Query: | 63 | NVCYDRAFPISHIRFWALQIIFVSTPTLIYLGHVLHIVRMEEKKKEREEEEQLKRESPSP | 122 |
| | | \|\|\|\|\|+ \|\|\|\|\|+\| \| \|\|+\|\|\|\|\|\|+\|+\|\|\|\|\| + \|\| \|\|\| +\|+\|\|\| \| | |
| Sbjct: | 62 | NVCYDQFFPISHVRLWVLQLIFVSTPSLLYLGHVAYRVRREEKLREKEEEHSKGLYSEEA | 121 |
| Query: | 123 | KEPPQDNPSSRDDRGRVRMAGALLRTYVFNIIFKTLFEVGFIAGQYFLYGFELKPLYRCD | 182 |
| | | \|+ + \|+\|\|+ \| \| \|\|\|\|+\|\|\|\|++\|\|\|\|\|+ \|\|\| \|\|\|\| + \|\| \| | |
| Sbjct: | 122 | KK------RCGSEDGKVRIRGGLWWTYVFSIIFKSIFEVGFLYGQYLLYGFTMSPLVVCS | 175 |
| Query: | 183 | RWPCPNTVDCFISRPTEKTIFIIFMLAVACASLLLNMLEIYHL | 225 |
| | | \| \|\|\|+\|\|\|\|\|+\|\|\|\|\|\|\|\|\|\|+\|\|\| \|+ \|\|\|\|+ \|+++\| | |
| Sbjct: | 176 | RAPCPHTVDCFVSRPTEKTIFIVFMLVVSAICLLLNLAELFYL | 218 |

[0231] TABLE 8F
Domain Analysis of NOV8

gnl|Smart|smart00037, CNX, Connexin homologues;
Connexin channels participate in the regulation of
signaling between developing and differentiated
cell types. (SEQ ID NO:108)
CD-Length=34 residues, 97.1% aligned
Score=83.2 bits (204), Expect=2e−17

| | | | |
|---|---|---|---|
| Query: | 44 | VWGDEQSDFTCNTQQPGCENVCYDRAFPISHIR | 76 |
| | | \|\|\|\|\|\|\|\|\|\|\|\|\|\|\|\|\|\|\|\|\|\|\|\|+ \|\|\|\|\|+\| | |
| Sbjct: | 2 | VWGDEQSDFTCNTQQPGCENVCYDQFFPISHVR | 34 |

[0232] The connexins are a family of integral membrane proteins that oligomerise to form intercellular channels that are clustered at gap junctions. These channels are specialised sites of cell-cell contact that allow the passage of ions, intracellular metabolites and messenger molecules from the cytoplasm of one cell to its apposing neighbours. They are found in almost all vertebrate cell types, and somewhat similar proteins have been cloned from plant species. Invertebrates utilise a different family of molecules, innexins, that share a similar predicted secondary structure to the vertebrate connexins, but have no sequence identity to them.

[0233] Vertebrate gap junction channels are thought to participate in diverse biological functions. For instance, in the heart they permit the rapid cell-cell transfer of action potentials, ensuring coordinated contraction of the cardiomyocytes. They are also responsible for neurotransmission at specialised ‘electrical’ synapses. In non-excitable tissues, such as the liver, they may allow metabolic cooperation between cells. In the brain, glial cells are extensively-coupled by gap junctions; this allows waves of intracellular Ca²⁺ to propagate through nervous tissue, and may contribute to their ability to spatially-buffer local changes in extracellular K⁺ concentration.

[0234] The connexin protein family is encoded by at least 13 genes in rodents, with many homologues cloned from other species. They show overlapping tissue expression patterns, most tissues expressing more than one connexin type. Their conductances, permeability to different molecules, phosphorylation and voltage-dependence of their gating, have been found to vary. Possible communication diversity is increased further by the fact that gap junctions may be formed by the association of different connexin isoforms from apposing cells. However, in vitro studies have shown that not all possible combinations of connexins produce active channels.

[0235] Hydropathy analysis predicts that all cloned connexins share a common transmembrane (TM) topology. Each connexin is thought to contain 4 TM domains, with two extracellular and three cytoplasmic regions. This model has been validated for several of the family members by in vitro biochemical analysis. Both N- and C-termini are thought to face the cytoplasm, and the third TM domain has an amphipathic character, suggesting that it contributes to the lining of the formed-channel. Amino acid sequence identity between the isoforms is ˜50-80%, with the TM domains being well conserved. Both extracellular loops contain characteristically conserved cysteine residues, which likely form intramolecular disulphide bonds. By contrast, the single putative intracellular loop (between TM domains 2 and 3) and the cytoplasmic C-terminus are highly variable among the family members. Six connexins are thought to associate to form a hemi-channel, or connexon. Two connexons then interact (likely via the extracellular loops of their connexins) to form the complete gap junction channel.

[0236] Two sets of nomenclature have been used to identify the connexins. The first, and most commonly used, classifies the connexin molecules according to molecular weight, such as connexin43 (abbreviated to Cx43), indicating a connexin of molecular weight close to 43 kD. However, studies have revealed cases where clear functional homologues exist across species that have quite different molecular masses; therefore, an alternative nomenclature was proposed based on evolutionary considerations, which divides the family into two major subclasses, alpha and beta, each with a number of members. Due to their ubiquity and overlapping tissue distributions, it has proved difficult to elucidate the functions of individual connexin isoforms. To circumvent this problem, particular connexin-encoding genes have been subjected to targeted-disruption in mice, and the phenotype of the resulting animals investigated. Around half the connexin isoforms have been investigated in this manner. Further insight into the functional roles of connexins has come from the discovery that a number of human diseases are caused by mutations in connexin genes. For instance, mutations in Cx32 give rise to a form of inherited peripheral neuropathy called X-linked dominant Charcot-Marie-Tooth disease. Similarly, mutations in Cx26 are responsible for both autosomal recessive and dominant forms of nonsyndromic deafness, a disorder characterised by hearing loss, with no apparent effects on other organ systems.

[0237] Gap junction alpha-3 (GJA3) protein (also called connexin46, or Cx46) is a connexin of ˜435 amino acid residues. The bovine form is slightly shorter (401 residues) and is hence known as Cx44, having a molecular mass of ˜44 kD. Cx46 (together with Cx50) is a connexin isoform expressed in the lens fibres of the eye. Here, gap junctions join the cells into a functional syncytium, and also couple the fibres to the epithelial cells on the anterior surface of the lens. The lens fibres depend on this epithelium for their metabolic support, since they lose their intra-cellular organelles, and accumulate high concentrations of crystallins, in order to produce their optical transparency. Genetically-engineered mice deficient in Cx46 demonstrate the importance of Cx46 in forming lens fibre gap junctions; these mice develop normal lenses, but subsequently develop early onset senile-type cataracts that resemble human nuclear cataracts. Aberrant proteolysis of crystallin proteins has been observed in the lenses of Cx46-null mice.

[0238] The disclosed NOV8 nucleic acid of the invention encoding a Connexin GJA3-like protein includes the nucleic acid whose sequence is provided in Table 8A, or a fragment thereof The invention also includes a mutant or variant nucleic acid any of whose bases may be changed from the corresponding base shown in Table 8A while still encoding a protein that maintains its Connexin GJA3-like activities and physiological functions, or a fragment of such a nucleic acid. The invention further includes nucleic acids whose sequences are complementary to those just described, including nucleic acid fragments that are complementary to any of the nucleic acids just described. The invention additionally includes nucleic acids or nucleic acid fragments, or complements thereto, whose structures include chemical modifications. Such modifications include, by way of nonlimiting example, modified bases, and nucleic acids whose sugar phosphate backbones are modified or derivatized. These modifications are carried out at least in part to enhance the chemical stability of the modified nucleic acid, such that they may be used, for example, as antisense binding nucleic acids in therapeutic applications in a subject. In the mutant or variant nucleic acids, and their complements, up to about 10% percent of the bases may be so changed.

[0239] The disclosed NOV8 protein of the invention includes the Connexin GJA3-like protein whose sequence is provided in Table 8B. The invention also includes a mutant or variant protein any of whose residues may be changed from the corresponding residue shown in Table 2 while still encoding a protein that maintains its Connexin GJA3-like activities and physiological functions, or a functional fragment thereof. In the mutant or variant protein, up to about 66% percent of the residues may be so changed.

[0240] The invention further encompasses antibodies and antibody fragments, such as F_{ab} or (F_{ab})₂, that bind immunospecifically to any of the proteins of the invention.

[0241] The above defined information for this invention suggests that this Connexin GJA3-like protein (NOV8) may function as a member of a “Connexin GJA3 family”. Therefore, the NOV8 nucleic acids and proteins identified here may be useful in potential therapeutic applications implicated in (but not limited to) various pathologies and disorders as indicated below. The potential therapeutic applications for this invention include, but are not limited to: protein therapeutic, small molecule drug target, antibody target (therapeutic, diagnostic, drug targeting/cytotoxic antibody), diagnostic and/or prognostic marker, gene therapy (gene delivery/gene ablation), research tools, tissue regeneration in vivo and in vitro of all tissues and cell types composing (but not limited to) those defined here.

[0242] The NOV8 nucleic acids and proteins of the invention are useful in potential therapeutic applications implicated in nonsyndromic deafness, keratinization disorders, gap-junction-related neuropathies and other pathological conditions of the nervous system, where dysfunctions of junctional communication are considered to play a casual role, demyelinating neuropathies (including Charcot-Marie-Tooth disease), erythrokeratodermia variabilis (EKV), atrioventricular (AV) conduction defects such as arrhythmia, lens cataracts and/or other diseases or pathologies.

[0243] NOV8 nucleic acids and polypeptides are further useful in the generation of antibodies that bind immuno-specifically to the novel NOV8 substances for use in therapeutic or diagnostic methods. These antibodies may be generated according to methods known in the art, using prediction from hydrophobicity charts, as described in the “Anti-NOVX Antibodies” section below. The disclosed NOV8 protein has multiple hydrophilic regions, each of which can be used as an immunogen. In one embodiment, a contemplated NOV8 epitope is from about amino acids 40 to 80. In another embodiment, a NOV8 epitope is from about amino acids 90 to 150, from about amino acids 170 to 200, or from about amino acids 220 to 320. These novel proteins can be used in assay systems for functional analysis of various human disorders, which will help in understanding of pathology of the disease and development of new drug targets for various disorders.

[0244] NOV9

[0245] A disclosed NOV9 nucleic acid of 967 nucleotides (also referred to as CG50271-01) encoding a novel Olfactory Receptor-like protein is shown in Table 9A. An open reading frame was identified beginning with an ATG initiation codon at nucleotides 12-14 and ending with a TGA codon at nucleotides 948-950. A putative untranslated region upstream from the initiation codon and downstream from the termination codon is underlined in Table 9A. The start and stop codons are in bold letters.

TABLE 9A
NOV9 nucleotide sequence.

| | |
|---|---|
| ACTAACAAAGAATGGATCAGAAAAATGGAAGTTCTT | (SEQ ID NO:33) |
| TCACTGGATTTATCCTACTGGGTTTCTCTGACAGGC | |
| CTCAGCTGGAGCTAGTCCTCTTTGTGGTTCTTTTGA | |
| TCTTCTATATCTTCACTTTGCTGGGGAACAAAACCA | |
| TCATTGTATTATCTCACTTGGACCCACATCTTCACA | |
| ATCCTATGTATTTTTTCTTCTCCAACCTAAGCTTTT | |
| TGGATCTGTGTTACACAACCGGCATTGTTCCACAGC | |
| TCCTGGTTAATCTCAGGGGAGCAGACAAATCAATCT | |
| CCTATGGTGGTTGTGTAGTTCAGCTGTACATCTCTC | |
| TAGGCTTGGGATCTACAGAATGCGTTCTCTTAGGAG | |
| TGATGGCATTTGACCGCTATGCAGCTGTTTGCAGGC | |
| CCCTCCACTACACAGTAGTCATGCACCCTTGTCTGT | |
| ATGTGCTGATGGCTTCTACTTCATGGGTCATTGGTT | |
| TTGCCAACTCCCTATTGCAGACGGTGCTCATCTTGC | |
| TTTTAACACTTTGTGGAAGAAATAAATTAGAACACT | |
| TTCTTTGTGAGGTTCCTCCATTGCTCAAGCTTGCCT | |
| GTGTTGACACTACTATGAATGAATCTGAACTCTTCT | |
| TTGTCAGTGTCATTATTCTTCTTGTACCTGTTGCAT | |
| TAATCATATTCTCCTATAGTCAGATTGTCAGGGCAG | |
| TCATGAGGATAAAGTCAGCAACAGGGCAGAGAAAAG | |
| TGTTTGGGACATGTGGCTCCCACCTCACAGTGGTTT | |
| CCCTGTTCTACGGCACAGCTATCTATGCTTACCTCC | |
| AGCCCGGCAACAACTACTCTCAGGATCAGGGCAAGT | |
| TCATCTCTCTCTTCTACACCATCATTACACCCATGA | |
| TCAACCCCCTCATATATACACTGAGGAACAAGGATG | |
| TGAAAGGAGCACTTAAGAAGGTGCTCTGGAAGAACT | |
| ACGACTCCAGATGACTTGGAGAGAAAGACAT | |

[0246] The disclosed NOV9 polypeptide (SEQ ID NO: 30) encoded by SEQ ID NO: 29 has 312 amino acid residues, a molecular weight of 34977.1 and is presented in Table 9B using the one-letter amino acid code. Signal P, Psort and/or Hydropathy results predict that NOV9 has a signal peptide and is likely to be localized in the plasma membrane with a certainty of 0.6400. I The most likely ceavage site for NOV9 is between positions 41 and 42, LLG-NK.

TABLE 9B
Encoded NOV9 protein sequence.

| | |
|---|---|
| MDQKNGSSFTGFILLGFSDRPQLELVLFVVLLIFYI | (SEQ ID NO:34) |
| FTLLGNKTIIVLSHLDPHLHNPMYFFFSNLSFLDLC | |
| YTTGIVPQLLVNLRGADKSISYGGCVVQLYISLGLG | |
| STECVLLGVMAFDRYAAVCRPLHYTVVMHPCLYVLM | |
| ASTSWVIGFANSLLQTVLILLLTLCGRNKLEHFLCE | |
| VPPLLKLACVDTTMNESELFFVSVIILLVPVALIIF | |
| SYSQIVRAVMRIKSATGQRKVFGTCGSHLTVVSLFY | |
| GTAIYAYLQPGNNYSQDQGKFISLFYTIITPMINPL | |
| IYTLRNKDVKGALKKVLWKNYDSR | |

[0247] A BLASTX of NOV9 shows a 55% (identities) and 72% (positives) similarity to a Mouse Odorant Receptor MOR18 protein (E=1.2e⁻¹⁰¹).

[0248] The disclosed NOV9 polypeptide has homology to the amino acid sequences shown in the BLASTP data listed in Table 9C.

TABLE 9C
BLAST results for NOV9

| Gene Index/ | | Length | Identity | Positives | |
|---|---|---|---|---|---|
| Identifier | Protein/Organism | (aa) | (%) | (%) | Expect |
| gi\|17464665\|ref\|XP_{—} | similar to | 312 | 265/312 | 265/312 | e−143 |
| 069524.1\| | olfactory | | (84%) | (84%) | |
| (XM_069524) | receptor, family | | | | |
| | 2, subfamily W | | | | |
| gi\|17455398\|ref\|XP_{—} | similar to | 252 | 221/249 | 222/249 | e−119 |
| 069445.1\| | olfactory | | (88%) | (88%) | |
| (XM_069445) | receptor | | | | |
| | (H. sapiens) | | | | |
| | [Homo sapiens] | | | | |
| gi\|17445400\|ref\|XP_{—} | similar to | 309 | 169/301 | 205/301 | 1e−87 |
| 060573.1\| | olfactory | | (56%) | (67%) | |
| (XM_060573) | receptor 15 | | | | |
| | (H. sapiens) | | | | |
| | [Homo sapiens] | | | | |
| gi\|14423800\|sp\| | OLFACTORY | 357 | 170/308 | 207/308 | 2e−87 |
| Q9GZK3\|O2B2_{—} | RECEPTOR 2B2 | | (55%) | (67%) | |
| HUMAN | (OLFACTORY | | | | |
| | RECEPTOR 6-1) | | | | |
| | (OR6-1) | | | | |
| | (HS6M1-10) | | | | |
| gi\|13624329\|ref\|NP_{—} | olfactory | 320 | 167/305 | 202/305 | 3e−87 |
| 112165.1\| | receptor, family | | (54%) | (65%) | |
| (NM_030903) | 2, subfamily W, | | | | |
| | member 1 [Homo sapiens] | | | | |

[0249] The homology between these and other sequences is shown graphically in the ClustalW analysis shown in Table 9D. In the ClustalW alignment of the NOV9 protein, as well as all other ClustalW analyses herein, the black outlined amino acid residues indicate regions of conserved sequence (i e., regions that may be required to preserve structural or functional properties), whereas non-highlighted amino acid residues are less conserved and can potentially be altered to a much broader extent without altering protein structure or function.

[image]

[image]

[0250] Table 9E lists the domain description from DOMAIN analysis results against NOV9. This indicates that the NOV9 sequence has properties similar to those of other proteins known to contain this domain.

TABLE 9E
Domain Analysis of NOV9

gnl|Pfam|pfam00001, 7tm_1, 7 transmembrane receptor (rhodopsin
family). (SEQ ID NO:114)
CD-Length 254 residues, 100.0% aligned
Score=88.2 bits (217), Expect=6e−19

| | | | |
|---|---|---|---|
| Query: | 41 | GNKTIIVLSHLDPHLHNPMYFFFSNLSFLDLCYTTGIVPQLLVNLRGADKSISYGGCVVQ | 100 |
| | | \|\| +\|++ \| \| \| \|\|+ \|\| + + \| \| \| \| \| \| + | |
| Sbjct: | 1 | GNLLVILVILRTKKLRTPTNIFLLNLAVADLLFLLTLPPWALYYLVGGDWVFGDALCKLV | 60 |
| Query: | 101 | LYISLGLGSTECVLLGVMAFDRYAAVCRPLHYTVVMHPCLYVLMASTSWVIGFANSLLQT | 160 |
| | | + + \| +\|\| ++ \|\|\| \|+ \|\| \| + \| ++ \|\|+ \|\| | |
| Sbjct: | 61 | GALFVVNGYASILLLTAISIDRYLAIVHPLRYRRIRTPRRAKVLILLVWVLALLLSLPPL | 120 |
| Query: | 161 | VLILLLTLCGRNKLEHFLCEVPPLLKLACVDTTMNESELFFVSVIILLVPVALIIFSYSQ | 220 |
| | | + \| \|+ \| + \| + ++ \| +\|+ +\|+ \|++ | |
| Sbjct: | 121 | LFSWLRTVEEGNTTVCLID--FPEESVKRSYVLLSTLVGFV-------LPLLVILVCYTR | 171 |
| Query: | 221 | IVRAVMR---------IKSATGQRKVFGTCGSHLTVVSLFYGTAIYAYLQPGNNYS---- | 267 |
| | | \|+\| + + +\|++ ++ + \| + \| \| \| | |
| Sbjct: | 172 | ILRTLRKRARSQRSLKRRSSSERKAAKMLLVVVVVFVLCWLPYHIVLLLDSLCLLSIWRV | 231 |
| Query: | 268 | QDQGKFISLFYTIITPMINPLIY | 290 |
| | | \|+\|+ + +\|\|+\|\| | |
| Sbjct: | 232 | LPTALLITLWLAYVNSCLNPIIY | 254 |

[0251] G-Protein Coupled Receptor (GPCRs) have been identified as an extremely large family of protein receptors in a number of species. At the phylogenetic level they can be classified into four major subfamilies. These receptors share a seven transmembrane domain structure with many neurotransmitter and hormone receptors. They are likely to be involved in the recognition and transduction of various signals mediated by G-Proteins, hence their name G-Protein Coupled Receptors. The human GPCR genes are generally intron-less and belong to four gene subfamilies, displaying great sequence variability. These genes are dominantly expressed in olfactory epithelium.

[0252] Olfactory receptors (ORs) have been identified as an extremely large family of GPCRs in a number of species. As members of the GPCR family, these receptors share a seven transmembrane domain structure with many neurotransmitter and hormone receptors, and are likely to underlie the recognition and G-protein-mediated transduction of odorant signals. Like GPCRs, the ORs can be expressed in a variety of tissues where they are thought to be involved in recognition and transmission of a variety of signals. The human OR genes are typically intron-less and belong to four different gene subfamilies, displaying great sequence variability. These genes are dominantly expressed in olfactory epithelium.

[0253] A BLASTX of the Olfactory Receptor-like protein CG50271-01 described in this invention shows a 55% (identities) and 72% (positives) similarity to a Mouse Odorant Receptor MOR18 protein.

[0254] Tsuboi et al. (J Neurosci 1999; 19:8409-18) characterized two separate odorant receptor (OR) gene clusters to examine how olfactory neurons expressing closely linked and homologous OR genes project their axons to the olfactory bulb. Murine OR genes, MOR28, MOR10, and MOR83, share 75-95% similarities in the amino acid sequences and are tightly linked on chromosome 14. In situ hybridization has demonstrated that the three genes are expressed in the same zone, at the most dorsolateral and ventromedial portions of the olfactory epithelium, and are rarely expressed simultaneously in individual neurons. Furthermore, they have found that olfactory neurons expressing MOR28, MOR10, or MOR83 project their axons to very close but distinct subsets of glomeruli on the medial and lateral sides of the olfactory bulb. Similar results have been obtained with another murine OR gene cluster for A16 and MOR18 on chromosome 2, sharing 91% similarity in the amino acid sequences. These results may indicate an intriguing possibility that olfactory neurons expressing homologous OR genes within a cluster tend to converge their axons to proximal but distinct subsets of glomeruli. These lines of study will shed light on the molecular basis of topographical projection of olfactory neurons to the olfactory bulb.

[0255] The disclosed NOV9 nucleic acid of the invention encoding a Olfactory Receptor-like protein includes the nucleic acid whose sequence is provided in Table 9A, or a fragment thereof. The invention also includes a mutant or variant nucleic acid any of whose bases may be changed from the corresponding base shown in Table 9A while still encoding a protein that maintains its Olfactory Receptor-like activities and physiological functions, or a fragment of such a nucleic acid. The invention further includes nucleic acids whose sequences are complementary to those just described, including nucleic acid fragments that are complementary to any of the nucleic acids just described. The invention additionally includes nucleic acids or nucleic acid fragments, or complements thereto, whose structures include chemical modifications. Such modifications include, by way of nonlimiting example, modified bases, and nucleic acids whose sugar phosphate backbones are modified or derivatized. These modifications are carried out at least in part to enhance the chemical stability of the modified nucleic acid, such that they may be used, for example, as antisense binding nucleic acids in therapeutic applications in a subject.

[0256] The disclosed NOV9 protein of the invention includes the Olfactory Receptor-like protein whose sequence is provided in Table 9B. The invention also includes a mutant or variant protein any of whose residues may be changed from the corresponding residue shown in Table 2 while still encoding a protein that maintains its Olfactory Receptor-like activities and physiological functions, or a functional fragment thereof. In the mutant or variant protein, up to about 46% percent of the residues may be so changed.

[0257] The invention further encompasses antibodies and antibody fragments, such as F_{ab} or (F_{ab})₂, that bind immunospecifically to any of the proteins of the invention.

[0258] The above defined information for this invention suggests that this Olfactory Receptor-like protein (NOV9) may function as a member of a “Olfactory Receptor family”. Therefore, the NOV9 nucleic acids and proteins identified here may be useful in potential therapeutic applications implicated in (but not limited to) various pathologies and disorders as indicated below. The potential therapeutic applications for this invention include, but are not limited to: protein therapeutic, small molecule drug target, antibody target (therapeutic, diagnostic, drug targeting/cytotoxic antibody), diagnostic and/or prognostic marker, gene therapy (gene delivery/gene ablation), research tools, tissue regeneration in vivo and in vitro of all tissues and cell types composing (but not limited to) those defined here.

[0259] The NOV9 nucleic acids and proteins of the invention are useful in potential therapeutic applications implicated in various diseases and pathologies.

[0260] NOV9 nucleic acids and polypeptides are further useful in the generation of antibodies that bind immuno-specifically to the novel NOV9 substances for use in therapeutic or diagnostic methods. These antibodies may be generated according to methods known in the art, using prediction from hydrophobicity charts, as described in the “Anti-NOVX Antibodies” section below. The disclosed NOV9 protein has multiple hydrophilic regions, each of which can be used as an immunogen. These novel proteins can be used in assay systems for functional analysis of various human disorders, which will help in understanding of pathology of the disease and development of new drug targets for various disorders.

[0261] NOV10

[0262] A disclosed NOV10 nucleic acid of 1596 nucleotides (also referred to as CG55844-01) encoding a novel P450-like protein is shown in Table 10A. An open reading frame was identified beginning with an ATG initiation codon at nucleotides 549-551 and ending with a TGA codon at nucleotides 1594-1596. A putative untranslated region upstream from the initiation codon and downstream from the termination codon is underlined in Table 10A. The start and stop codons are in bold letters.

TABLE 10A
NOV10 nucleotide sequence.

| | |
|---|---|
| ATGCTGCCCATCACAGACCGCCTGCTGCACCTCCTG | (SEQ ID NO:35) |
| GGGCTGGAGAAGACGGCGTTCCGCATATACGCGGTG | |
| TCCACCCTTCTCCTCTTCCTGCTCTTCTTCCTGTTC | |
| CGCCTGCTGCTGCGGTTCCTGAGGCTCTGCAGGAGC | |
| TTCTACATCACCTGCCGCCGGCTGCGCTGCTTCCCC | |
| CAGCCTCCCCGGCGCAACTGGCTGCTGGGCCACCTG | |
| GGCATGTACCTTCCAAATGAGGCGGGCCTTCAAGAT | |
| GAGAAGAAGGTACTGGACAACATGCACCATGTACTC | |
| TTGGTATGGATGGGACCTGTCCTGCCGCTGTTGGTT | |
| CTGGTGCACCCTGATTACATCAAACCCCTTTTGGGA | |
| GCCTCAGCTGCCATCGCCCCCAAGGATGACCTCTTC | |
| TATGGCTTCCTAAAACCTTGGCTAGGGGATGGGCTG | |
| CTGCTCAGCAAAGGTGACAAGTGGAGCCGGCACCGT | |
| CGCCTGCTGACACCCGCCTTCCACTTTGACATCCTG | |
| AAGCCTTACATGAAGATCTTCAACCAGAGCGCTGAC | |
| ATTATGCATGCTAAATGGCGGCATCTGGCAGAGGGC | |
| TCAGCGGTCTCCCTTGATATGTTTGAGCATATCAGC | |
| CTCATGACCCTGGACAGTCTTCAGAAATGTGTCTTC | |
| AGCTACAACAGCAACTGCCAAGAGAAGATGAGTGAT | |
| TATATCTCCGCTATCATTGAACTGAGCGCTCTGTCT | |
| GTCCGGCGCCAGTATCGCTTGCACCACTACCTCGAC | |
| TTCATTTACTACCGCTCGGCGGATGGGCGGAGGTTC | |
| CGGCAGGCCTGTGACATGGTGCACCACTTCACCACT | |
| GAAGTCATCCAGGAACGGCGGCGGGCACTGCGTCAG | |
| CAGGGGGCCGAGGCCTGGCTTAAGGCCAAGCAGGGG | |
| AAGACCTTGGACTTTATTGATGTGCTGCTCCTGGCC | |
| AGGGATGAAGATGGAAAGGAACTGTCAGACGAGGAT | |
| ATCCGAGCCGAAGCAGACACCTTCATGTTTGAGGGT | |
| CACGACACAACATCCAGTGGGATCTCTTGGATGCTG | |
| TTCAATTTGGCAAAGGATCCGGAATACCAGGAGAAA | |
| TGCCGAGAAGAGATTCAGGAAGTCATGAAAGGCCGG | |
| GAGCTGGAGGAGCTCGAGTGGGACGATCTGACTCAG | |
| CTGCCCTTTACAACTATGTGCATTAAGGAGAGCCTG | |
| CGCCAGTACCCACCTGTCACTCTTGTCTCTCGCCAA | |
| TGCACGGAGGACATCAAGCTCCCAGATGGGCGCATC | |
| ATCCCCAAAGGAATCATCTGCTTGGTCAGCATCTAT | |
| GGAACCCACCACAACCCCACAGTGTGGCCTGACTCC | |
| AAGGTGTACAACCCCTACCGCTTTGACCCGGACAAC | |
| CCACAGCAGCGCTCTCCACTGGCCTATGTGCCCTTC | |
| TCTGCAGGACCCAGGAATTGCATCGGACAGAGCTTC | |
| GCCATGGCCGAGTTGCGCGTGGTTGTGGCACTAACA | |
| CTGCTACGTTTCCGCCTGAGCGTGGACCGAACGCGC | |
| AAGGTGCGGCGGAAGCCGGAGCTCATACTGCGCACG | |
| GAGAACGGGCTCTGGCTCAAGGTGGAGCCGCTGCCT | |
| CCGCGGGCCTGA | |

[0263] In a search of public sequence databases, the NOV10 nucleic acid sequence, localized to chromosome 19, has 1111 of 1578 bases (70%) identical to a gb:GENBANK-ID:HSU02388|acc:U02388.2 mRNA from Homo sapiens (Homo sapiens cytochrome P450 4F2 (CYP4F2) mRNA, complete cds) (E=7.4e⁻¹⁴⁷). Public nucleotide databases include all GenBank databases and the GeneSeq patent database.

[0264] The disclosed NOV10 polypeptide (SEQ ID NO: 36) encoded by SEQ ID NO: 35 has 532 amino acid residues and is presented in Table 10B using the one-letter amino acid code. Signal P, Psort and/or Hydropathy results predict that NOV10 has no signal peptide and is likely to be localized in the mitochondrial inner membrane with a certainty of 0.7491. In other embodiments, NOV10 may also be localized to the plasma membrane with a certainty of 0.6000, the Golgi body with a certainty of 0.4000, or in the endoplasmic reticulum (membrane) with a certainty of 0.3000. The most likely cleavage site for NOV10 is between positions 48 and 49: CRS-FY.

TABLE 10B
Encoded NOV10 protein sequence.

| | |
|---|---|
| MLPITDRLLHLLGLEKTAFRIYAVSTLLLFLLFFLF | (SEQ ID NO:36) |
| RLLLRFLRLCRSFYITCRRLRCFPQPPRRNWLLGHL | |
| GMYLPNEAGLQDEKKVLDNMHHVLLVWMGPVLPLLV | |
| LVHPDYIKPLLGASAAIAPKDDLFYGFLKPWLGDGL | |
| LLSKGDKWSRHRRLLTPAFHFDILKPYMKIFNQSAD | |
| IMHAKWRHLAEGSAVSLDMFEHISLMTLDSLQKCVF | |
| SYNSNCQEKMSDYISAIIELSALSVRRQYRLHHYLD | |
| FIYYRSADGRRFRQACDMVHHFTTEVIQERRRALRQ | |
| QGAEAWLKAKQGKTLDFIDVLLLARDEDGKELSDED | |
| IRAEADTFMFEGHDTTSSGISWMLFNLAKYPEYQEK | |
| CREEIQEVMKGRELEELEWDDLTQLPFTTMCIKESL | |
| RQYPPVTLVSRQCTEDIKLPDGRIIPKGIICLVSIY | |
| GTHHNPTVWPDSKVYNPYRFDPDNPQQRSPLAYVPF | |
| SAGPRNCIGQSFAMAELRVVVALTLLRFRLSVDRTR | |
| KVRRKPELILRTENFLWLKVEPLPPRAX | |

[0265] A search of sequence databases reveals that the NOV10 amino acid sequence has 339 of 505 amino acid residues (67%) identical to, and 415 of 505 amino acid residues (82%) similar to, the 520 amino acid residue ptnr:SWISSPROT-ACC:P78329 protein from Homo sapiens (Human) (Cytochrome P450 4F2 (EC 1.14.13.30) (CYPIVF2) (Leukotriene-B4 Omega-Hydroxylase) (Leukotriene-B4 20-Monooxygenase) (Cytochrome P450-LTB-Omega))(E=9.8e⁻¹⁸⁸). Public amino acid databases include the GenBank databases, SwissProt, PDB and PIR.

[0266] The Novel P450 disclosed in this invention is expressed in at least lung. This information was derived by determining the tissue sources of the sequences that were included in the invention including but not limited to SeqCalling sources, Public EST sources, Literature sources, and/or RACE sources.

[0267] In addition, the sequence is predicted to be expressed in colon and liver because of the expression pattern of (GENBANK-ID: gb:GENBANK-ID:HSU02388|acc:U02388.2) a closely related Homo sapiens cytochrome P450 4F2 (CYP4F2) mRNA, complete cds homolog.

[0268] The disclosed NOV10 polypeptide has homology to the amino acid sequences shown in the BLASTP data listed in Table 10C.

TABLE 10C
BLAST results for NOV10

| Gene Index/ | | Length | Identity | Positives | |
|---|---|---|---|---|---|
| Identifier | Protein/Organism | (aa) | (%) | (%) | Expect |
| gi\|14767705\|ref\|XP_{—} | cytochrome P450, | 520 | 309/481 | 378/481 | 0.0 |
| 029072.1\| | subfamily IVF, | | (64%) | (78%) | |
| (XM_029072) | polypeptide 3 | | | | |
| | [Homo sapiens] | | | | |
| gi\|2997737\|gb\| | cytochrome P-450 | 520 | 305/481 | 379/481 | 0.0 |
| AAC08589.1\| | [Homo sapiens] | | (63%) | (78%) | |
| (AF054821) | | | | | |
| gi\|4503241\|ref\| | cytochrome P450, | 520 | 308/481 | 378/481 | 0.0 |
| NP_000887.1\| | subfamily IVF, | | (64%) | (78%) | |
| (NM_000896) | polypeptide 3; | | | | |
| | leukotriene B4 | | | | |
| | omega | | | | |
| | hydroxylase; | | | | |
| | leukotriene-B4 | | | | |
| | 20-monooxygenase; | | | | |
| | cytochrome P450- | | | | |
| | LTB-omega | | | | |
| | [Homo sapiens] | | | | |
| gi\|13435391\|ref\|NP_{—} | cytochrome P450, | 520 | 304/481 | 380/481 | 0.0 |
| 001073.3\| | subfamily IVF, | | (63%) | (78%) | |
| (NM_001082) | polypeptide 2; | | | | |
| | leukotriene B4 omega- | | | | |
| | hydroxylase; | | | | |
| | leukotriene-B4 | | | | |
| | 20-monooxygenase | | | | |
| | [Homo sapiens] | | | | |
| gi\|4519535\|dbj\| | Leukotriene B4 | 520 | 303/481 | 380/481 | 0.0 |
| BAA75823.1\| | omega-hydroxylase | | (62%) | (78%) | |
| (AB015306) | [Homo sapiens] | | | | |

[0269] The homology between these and other sequences is shown graphically in the ClustalW analysis shown in Table 10D. In the ClustalW alignment of the NOV10 protein, as well as all other ClustalW analyses herein, the black outlined amino acid residues indicate regions of conserved sequence (i.e., regions that may be required to preserve structural or functional properties), whereas non-highlighted amino acid residues are less conserved and can potentially be altered to a much broader extent without altering protein structure or function.

[image]

[image]

[0270] Tables 01E-10F lists the domain description from DOMAIN analysis results against NOV10. This indicates that the NOV10 sequence has properties similar to those of other proteins known to contain this domain.

TABLE 10E
Domain Analysis of NOV10

gnl|Pfam|pfam00067, p450, Cytochrome P450. Cytochrome P450s are
involved in the oxidative degradation of various compounds.
Particularly well known for their role in the degradation of
environmental toxins and mutagens. Structure is mostly alpha, and
binds a heme cofactor. (SEQ ID NO:73)
CD-Length = 445 residues, 80.0% aligned
Score = 282 bits (722). Expect = 3e − 77

| | | | |
|---|---|---|---|
| Query: | 152 | WSRHRRLLTPAFHFDILKPYMKIFNQSADIMHAKWRHLAEGSAVSLDMFEHISLMTLDSL | 211 |
| | | \| + \|\|\|\|\| \| \| + \| \|+ + + \| + +\|+ \| ++ \|+ + | |
| Sbjct: | 88 | WRQLRRLLTLRF-FGMGKRS-KEERIQEEARDLVERLRKEQGSPIDITELLAPAPLNVI | 145 |
| Query: | 212 | QKCVFSYNSNCQEKMSDYISAIIELSALSVRRQYRLHHYLDFIYYRSADGRRFRQACDMV | 271 |
| | | +\| + ++ +++ \| +\|+ \| \|\|\| \| \|+ +\| + | |
| Sbjct: | 146 | CSLLFGVRFDYED--PEFLKLIDKLNELFFLVSPW-GQLLDFFRYLPGSHRKAFKAAKDL | 202 |
| Query: | 272 | HHFTTEVIQERRRALRQQGAEAWLKAKQGKTLDFIDVLLL-ARDEDGKELSDEDIRAEAD | 330 |
| | | + ++\|+\|\|\| \| \| \|\|+\| \|\|+ \|+ \| \| \|\|+\|\|+++\| | |
| Sbjct: | 203 | KDYLDKLIEERRETLEP-----------GDPRDFLDSLLIEAKREGGSELTDEELKATVL | 251 |
| Query: | 331 | TFMFEGHDTTSSGISWMLFNLAKYPEYQEKCREEIQEVMKGRELEELEWDDLTQLPFTTM | 390 |
| | | +\| \| \|\|\|\|\| +\|\| \|+ \|\|\|+\|\| \| \| \|\|\|\| \|\|+ +\|\| +\|+ | |
| Sbjct: | 252 | DLLFAGTDTTSSTLSWALYLLAKHPEVQAKLREEIDEVI--GRDRSPTYDDRANMPYLDA | 309 |
| Query: | 391 | CIKESLRQYPPV-TLVSRQCTEDIKLPDGRIIPKGIICLVSIYGTHHNPTVWPDSKVYNP | 449 |
| | | \|\|\|+\|\| +\| \| \|+ \| \|\|\| ++ \|\| +\|\|\|\| + +\|++\| \| +\| \|+\|+ + ++\| | |
| Sbjct: | 310 | VIKETLRLHPVVPLLLPRVATEDTEI-DGYLIPKGTLVIVNLYSLHRDPKVFPNPEEFDP | 368 |
| Query: | 450 | YRFDPDNPQQRSPLAYVPFSAGPRNCIGQSFAMAELRVVVALTLLRFRLSVDRTRKVRRK | 509 |
| | | \|\| +\| + + \|++\|\| \|\|\|\|\|\|+\|+ \| \|\| + +\| \| \|\| \| + + | |
| Sbjct: | 369 | ERFLDENGKFKKSYAFLPFGAGPRNCLGERLARMELFLFLATLLQRFELELVPPGDIPLT | 428 |
| Query: | 510 | PELILRTENGLWLKV | 524 |
| | | \|+ + ++ | |
| Sbjct: | 429 | PKPLGLPSKPPLYQL | 443 |

[0271] The P450 gene superfamily is a biologically diverse class of oxidase enzymes; members of the class are found in all organisms. P450 proteins are clinically and toxicologically important in humans; they are the principal enzymes in the metabolism of drugs and xenobiotic compounds, as well as in the synthesis of cholesterol, steroids and other lipids. Induction of some P450 genes can also be a risk factor for several types of cancer. This diversity of function is mirrored in the diversity of nucleotide and protein sequences; there are currently over 100 human P450 forms described. Allelic forms of many cytochrome P450 genes have been identified as causing quantitatively different rates of drug metabolism, and hence are important to consider in the development of safe and effective human pharmaceutical therapies. [reviewed in E. Tanaka, J Clinical Pharmacy & Therapeutics 24:323-329, 1999].

[0272] The disclosed NOV10 nucleic acid of the invention encoding a P450-like protein includes the nucleic acid whose sequence is provided in Table 10A or a fragment thereof. The invention also includes a mutant or variant nucleic acid any of whose bases may be changed from the corresponding base shown in Table 10A while still encoding a protein that maintains its P450-like activities and physiological functions, or a fragment of such a nucleic acid. The invention further includes nucleic acids whose sequences are complementary to those just described, including nucleic acid fragments that are complementary to any of the nucleic acids just described. The invention additionally includes nucleic acids or nucleic acid fragments, or complements thereto, whose structures include chemical modifications. Such modifications include, by way of nonlimiting example, modified bases, and nucleic acids whose sugar phosphate backbones are modified or derivatized. These modifications are carried out at least in part to enhance the chemical stability of the modified nucleic acid, such that they may be used, for example, as antisense binding nucleic acids in therapeutic applications in a subject. In the mutant or variant nucleic acids, and their complements, up to about 30% percent of the bases may be so changed.

[0273] The disclosed NOV10 protein of the invention includes the P450-like protein whose sequence is provided in Table 10B. The invention also includes a mutant or variant protein any of whose residues may be changed from the corresponding residue shown in Table 10B while still encoding a protein that maintains its P450-like activities and physiological functions, or a functional fragment thereof. In the mutant or variant protein, up to about 33% percent of the residues may be so changed.

[0274] The invention further encompasses antibodies and antibody fragments, such as F_{ab} or (F_{ab})₂, that bind immunospecifically to any of the proteins of the invention.

[0275] The above defined information for this invention suggests that this P450-like protein (NOV10) may function as a member of a “P450 family”. Therefore, the NOV10 nucleic acids and proteins identified here may be useful in potential therapeutic applications implicated in (but not limited to) various pathologies and disorders as indicated below. The potential therapeutic applications for this invention include, but are not limited to: protein therapeutic, small molecule drug target, antibody target (therapeutic, diagnostic, drug targeting/cytotoxic antibody), diagnostic and/or prognostic marker, gene therapy (gene delivery/gene ablation), research tools, tissue regeneration in vivo and in vitro of all tissues and cell types composing (but not limited to) those defined here.

[0276] The NOV10 nucleic acids and proteins of the invention are useful in potential therapeutic applications implicated in cancer including but not limited to various pathologies and disorders.

[0277] NOV10 nucleic acids and polypeptides are further useful in the generation of antibodies that bind immuno-specifically to the novel NOV10 substances for use in therapeutic or diagnostic methods. These antibodies may be generated according to methods known in the art, using prediction from hydrophobicity charts, as described in the “Anti-NOVX Antibodies” section below. The disclosed NOV10 protein has multiple hydrophilic regions, each of which can be used as an immunogen. In one embodiment, a contemplated NOV10 epitope is from about amino acids 50 to 100. In another embodiment, a NOV10 epitope is from about amino acids 120 to 180. In further embodiments, a NOV10 epitope is from about amino acids 200 to 420, from about amino acids 450 to 480, or from about amino acids 490 to 510. These novel proteins can be used in assay systems for functional analysis of various human disorders, which will help in understanding of pathology of the disease and development of new drug targets for various disorders.

[0278] NOV11

[0279] NOV11 includes three novel Integrin-like FG-GAP domain containing novel protein-like proteins disclosed below. The disclosed sequences have been named NOV11 a and NOV11b.

[0280] NOV11a

[0281] A disclosed NOV11nucleic acid of 3025 nucleotides (also referred to as CG55752-01) encoding a novel Alpha Glucosidase 2, Alpha Neutral Subunit-like protein is shown in Table 11A. An open reading frame was identified beginning with an ATG initiation codon at nucleotides 28-30 and ending with a TGA codon at nucleotides 2929-2931. A putative untranslated region upstream from the initiation codon is underlined in Table 11A. The start and stop codons are in bold letters.

TABLE 11A
NOV11a nucleotide sequence.

| | |
|---|---|
| ACAGGTGCCTGGGGGTCAGGCTTCCGCATGCGGGCT | (SEQ ID NO:37) |
| GCAGTTGCTGGCATTGCCTTCCGCAGGAGGCGTCAG | |
| AAACAGTGGCTTTCCAAGAAGTCCACCTATCAGGCA | |
| TTATTGGATTCAGTCACAACAGATGAAGACAGCACC | |
| AGGTTCCAAATCATCAATGAAGCAAGTAAGGTGAGG | |
| CGTCAGAAACAGTGGCTTTCCAAGAAGTCCACCTAT | |
| CAGGCATTATTGGATTCAGTCACAACAGATGAAGAC | |
| AGCACCAGGTTCCAAATCATCAATGAAGCAAGTAAG | |
| GTGCCTCTCCTGGCTGAAATTTATGGTATAGAAGGA | |
| AACATTTTCAGGCTTAAAATTAATGAAGAGACTCCT | |
| CTAAAACCCAGATTTGAAGTTCCGGATGTCCTCACA | |
| AGCAAGCCAAGCACTGTAAGGATTTCATGCTCTGGG | |
| GACACAGGCAGTCTGATATTGGCAGATGGAAAAGGA | |
| GACCTGAAGTGCCATATCACAGCAAACCCATTCAAG | |
| GTAGACTTGGTGTCTGAAGAAGAGGTTGTGATTAGC | |
| ATAAATTCCCTGGGCCAATTATACTTTGAGCATGGC | |
| AGGGCCCCTAGGGTCTCTTTCTCGGATAAGGTTAAT | |
| CTCACGCTTGGTAGCATATGGGATAAGATCAAGAAC | |
| CTTTTCTCTAGGCAAGGATCAAAAGACCCAGCTGAG | |
| GGCGATGGGGCCCAGCCTGAGGAAACACCCAGGGAT | |
| GGCGACAAGCCAGAGGAGACTCAGGGGAAGGCAGAG | |
| AAAGATGAGCCAGGAGCCTGGGAGGAGACATTCAAA | |
| ACTCACTCTGACAGCAAGCCGTATGGCCCTTCTTCT | |
| ATTGGTTTGGATTTCTCCTTGCATGGATTTGAGCAT | |
| CTTTATGGGATCCCACAACATGCAGAATCACACCAA | |
| CTTAAAAATACTGGGGATGGAGATGCTTACCGTCTT | |
| TATAACCTGGATGTCTATGGATACCAAATATATGAT | |
| AAAATGGGCATTTATGGTTCAGTACCTTATCTCCTG | |
| GCCCACAAACTGGGCAGAACTATAGGTATTTTCTGG | |
| CTGAATGCCTCGGAAACACTGGTGGAGATCAATACA | |
| GAGCCTGCAGGGATAGTCATCTTTGGTCCTGTCTCT | |
| TTGATTTATCAAAGCCAGGGAGATACACCTCTAACA | |
| ACTCATGTGCACTGGATGTCAGAGAGTGGCATCATT | |
| GATGTTTTTCTGCTGACAGGACCTACACCTTCTGAT | |
| GTCTTCAAACAGTACTCACACCTTACAGGTACACAA | |
| GCCATGCCCCCTCTTTTCTCTTTGGGATACCACCAG | |
| TGCCGCTGGAACTATGAAGATGAGCAGGATGTAAAA | |
| GCAGTGGATGCAGGGTTTGATGAGCATGACATTCCT | |
| TATGATGCCATGTGGCTGGACATAGAGCACACTGAG | |
| GGCAAGAGGTACTTCACCTGGGACAAAAACAGATTC | |
| CCAAACCCCAAGAGGATGCAAGAGCTGCTCAGGAGC | |
| AAAAAGCGTAAGCTTGTGGTCATCAGTGATCCCCAC | |
| ATCAAGATTGAACCTGACTACTCAGTATATGTGAAG | |
| GCCAAAGATCAGGGCTTCTTTGTGAAGAATCAGGAA | |
| GGGGAAGACTTTGAAGGGGTGTGTTGGCCAGGTATG | |
| AAATCATACCTGGATTTCACCAATCCCAAGGTCAGA | |
| GAGTGGTATTCAAGTATGTTCAGTTCCAATTGTGAT | |
| GGATCTACGGACATCCTCTTCCTTTGGAATGACATG | |
| AATGAGCCTTCTGTCTTTAGAGGGCCAGAGCAAACC | |
| ATGCAGAAGAATGCCATTCATCATGGCAATTGGGAG | |
| CACAGAGAGCTCCACAACATCTACGGTTTTTATATG | |
| GCTACTGCAGAAGGACTGATAAAACGATCTAAAGGG | |
| AAGGAGAGACCCTTTGTTCTTACACGTTCTTTCTTT | |
| GCTGGATCACAAAAGTATGGTGCCGTGTGGACAGGC | |
| GACAACACAGCAGAATGGAGCAACTTGAAAATTTCT | |
| ATCCCAATGTTACTCACTCTCAGCATTACTGGGATC | |
| TCTTTTTGCGGAGCTGACATAGGCGGGTTCATTGGG | |
| AATCCAGAGACAGAGCTGCTAGTGCGTTGGTACCAG | |
| GCTGGAGCCTACCAGCCCTTCTTCCGTGGCCATGCC | |
| ACCATGAACACCAAGCGACGAGAGCCCTGGCTCTTT | |
| GGGGAGGAACACACCCGACTCATCCGAGAAGCCATC | |
| AGAGAGCGCTATGGCCTCCTGCCATATTGGTATTCT | |
| CTGTTCTACCATGCACACGTGGCTTCCCAACCTGTC | |
| ATGAGGCCTCTGTGGGTAGAGTTCCCTGATGAACTA | |
| AAGACTTTTGATATGGAAGATGAATACATGTTAGGG | |
| AGTGCATTATTGGTTCATCCAGTCACAGAACCAAAA | |
| GCCACCACAGTTGATGTGTTTCTTCCAGGATCAAAT | |
| GAGGTAGTCTGGTATGACTATAAGACATTTGCTCAT | |
| TGGGAAGGAGGGTGTACTGTAAAGATCCCAGTACTG | |
| TTACAGATTCCAGTGTTTCAGCGAGGTGGAAGTGTG | |
| ATACCAATAAAGACAACTGTAGGAAAATCCACAGGC | |
| TGGATGACTGAATCCTCCTATGGACTCCGGGTTGCT | |
| CTAAGCACTCTCCAGGGTTCTTCAGTGGGTGAGTTA | |
| TATCTTGATGATGGCCATTCATTCCAATACCTCCAC | |
| CAGAAGCAATTTTTGCACAGGAAGTTTTCATTCTGT | |
| TCCAGTGTTCTGGTGGCCTCCTCTCCAGTATCTCAA | |
| GGACACTTACATACCCCACTCAGCATGACAAAAGCC | |
| CTGCTTTTCACTGTATCGTCTCCAGCCAGCGTGAAA | |
| ATGCGGCTTCACTACAGCCCAGAGAAAAGGGCCAGG | |
| TTTAGTCATTGTGCCAAAACATCCATCCTGAGCCTG | |
| GAGAAGCTCTCACTCAACATTGCCACTGACTGGGAG | |
| GTCCGCATCATATGACAAAGAACTGCCCCTGGTGAT | |
| GTGAGCAGGGACCTGCCTGCCCCTTTCAACCTTTCC | |
| CCTCACCTTTTTTGAGATTTTTGCTGCAATCTGTTT | |
| G | |

[0282] In a search of public sequence databases, the NOV11a nucleic acid sequence, located on chromosome 15 has 1839 of 2742 bases (67%) identical to a gb:GENBANK-ID:AF144074|acc:AF144074.1 mRNA from Homo sapiens (Homo sapiens glucosidase II alpha subunit mRNA, complete cds) (E=2.7e⁻²⁰⁵). Public nucleotide databases include all GenBank databases and the GeneSeq patent database.

[0283] The disclosed NOV11a polypeptide (SEQ ID NO: 38) encoded by SEQ ID NO: 37 has 967 amino acid residues and is presented in Table 11B using the one-letter amino acid code. Signal P, Psort and/or Hydropathy results predict that NOV11a has no signal peptide and is likely to be localized in the microbody (peroxisome) with a certainty of 0.7480. hn other embodiments, NOV11a may also be localized to the mitochondrial inner membrane with acertainty of 0.7070, the mitochondrial intermembrane space with a certainty of 0.6143, or in the mitochondrial matrix space with a certainty of 0.5762.

TABLE 11B
Encoded NOV11a protein sequence.

| | |
|---|---|
| MRAAVAGIAFRRRRQKQWLSKKSTYQALLDSVTTDE | (SEQ ID NO:38) |
| DSTRFQIINEASKVRRQKQWLSKKSTYQALLDSVTT | |
| DEDSTRFQIINEASKVPLLAEIYGIEGNIFRLKINE | |
| ETPLKPRFEVPDVLTSKPSTVRISCSGDTGSLILAD | |
| GKGDLKCHITANPFKVDLVSEEEVVISINSLGQLYF | |
| EHGRAPRVSFSDKVNLTLGSIWDKIKNLFSRQGSKD | |
| PAEGDGAQPEETPRDGDKPEETQGKAEKDEPGAWEE | |
| TFKTHSDSKPYGPSSIGLDFSLHGFEHLYGIPQHAE | |
| SHQLKNTGDGDAYRLYNLDVYGYQIYDKMGIYGSVP | |
| YLLAHKLGRTIGIFWLNASETLVEINTEPAGIVIFG | |
| PVSLIYQSQGDTPLTTHVHWMSESGIIDVFLLTGPT | |
| PSDVFKQYSHLTGTQAMPPLFSLGYHQCRWNYEDEQ | |
| DVKAVDAGFDEHDIPYDAMWLDIEHTEGKRYFTWDK | |
| NRFPNPKRMQELLRSKKRKLVVISDPHIKIEPDYSV | |
| YVKAKDQGFFVKNQEGEDFEGVCWPGMKSYLDFTNP | |
| KVREWYSSMFSSNCDGSTDILFLWNDMNEPSVFRGP | |
| EQTMQKNAIHHGNWEHRELHNIYGFYMATAEGLIKR | |
| SKGKERPFVLTRSFFAGSQKYGAVWTGDNTAEWSNL | |
| KISIPMLLTLSITGISFCGADIGGFIGNPETELLVR | |
| WYQAGAYQPFFRGHATMNTKRREPWLFGEEHTRLIR | |
| EAIRERYGLLPYWYSLFYHAHVASQPVMRPLWVEFP | |
| DELKTFDMEDEYMLGSALLVHPVTEPKATTVDVFLP | |
| GSNEVVWYDYKTFAHWEGGCTVKIPVLLQIPVFQRG | |
| GSVIPIKTTVGKSTGWMTESSYGLRVALSTLQGSSV | |
| GELYLDDGHSFQYLHQKQFLHRKFSFCSSVLVASSP | |
| VSQGHLHTPLSMTKALLFTVSSPASVKMRLHYSPEK | |
| RARFSHCAKTSILSLEKLSLNIATDWEVRII | |

[0284] A search of sequence databases reveals that the NOV11a amino acid sequence has 551 of 964 amino acid residues (57%) identical to, and 709 of 964 amino acid residues (73%) similar to, the 966 amino acid residue ptnr:SPTREMBL-ACC:Q9P0X0 protein from Homo sapiens (Human) (Glucosidase II Alpha Subunit) (E=9.7e⁻³⁰⁷). Public amino acid databases include the GenBank databases, SwissProt, PDB and PIR.

[0285] NOV11a is expressed in at least Adrenal Gland/Suprarenal gland, Aorta, Brain, Hippocampus, Kidney, Lung, Lymph node, Ovary, Parathyroid Gland, Prostate, Salivary Glands, Thyroid, Tonsils, Trachea, Uterus, Whole Organism. This information was derived by determining the tissue sources of the sequences that were included in the invention including but not limited to SeqCalling sources, Public EST sources, Literature sources, and/or RACE sources.

[0286] In addition, the sequence is predicted to be expressed in Brain, Hippocampus, Kidney, Lung because of the expression pattern of (GENBANK-ID: gb:GENBANK-ID:AF144074|acc: AF144074.1) a closely related Homo sapiens glucosidase II alpha subunit mRNA, complete cds homolog.

[0287] NOV11b

[0288] A disclosed NOV11b nucleic acid of 4483 nucleotides (also referred to as CG55752-02) encoding a novel Alpha Glucosidase 2-like protein is shown in Table 11C. An open reading frame was identified beginning with an ATG initiation codon at nucleotides 204-206 and ending with a TGA codon at nucleotides 2946-2948. A putative untranslated region upstream from the initiation codon is underlined in Table 11C. The start and stop codons are in bold letters.

TABLE 11C
NOV11b nucleotide sequence.

| | |
|---|---|
| AACGCTAGTTTGGGCCTGAAAAATTCCAGGAGCAAG | (SEQ ID NO:39) |
| AGTCAAGATTTGTCACTCCATGAGAATCTGGAGGGG | |
| ACTCCCTTCCCAGAAACTTGACGATGAAGTACTGGT | |
| TGTAATTTTAGAAAGACACCCAATCGGCTTTTTTAA | |
| AAGATCGCCCAGGGCCCTTGTCCTGAGAGCTGGGAG | |
| CTGGTCGGAGTGACAGAGAAGCCATGGAAGCAGCAG | |
| TGAAAGAGGAAATAAGTGTTGAAGATGAAGCTGTAG | |
| ATAAAAACATTTTCAGAGACTGTAACAAGATCGCAT | |
| TTTACAGGCGTCAGAAACAGTGGCTTTCCAAGAAGT | |
| CCACCTATCAGGCATTATTGGATTCAGTCACAACAG | |
| ATGAAGACAGCACCAGGTTCCAAATCATCAATGAAG | |
| CAAGTAAGGTTCCTCTCCTGGCTGAAATTTATGGTA | |
| TAGAAGGAAACATTTTCAGGCTTAAAATTAACGAAG | |
| AGACTCCTCTAAAACCCAGATTTGAAGTTCCGGATG | |
| TCCTCACAAGCAAGCCAAGCACTGTAAGGCTGATTT | |
| CATGCTCTGGGGACACAGGCAGTCTGATATTGGCAG | |
| ATGGAAAAGGAGACCTGAAGTGCCATATCACAGCAA | |
| ACCCATTCAAGGTAGACTTGGTGTCTGAAGAAGAGG | |
| TTGTGATTAGCATAAATTCCCTGGGCCAATTATACT | |
| TTGAGCATCTACAGATTCTTCACAAACAAAGAGCTG | |
| CTAAAGAAAATGAGGAGGAGACATCAGTGGACACCT | |
| CTCAGGAAAATCAAGAAGATCTGGGCCTGTGGGAAG | |
| AGAAATTTGGAAAATTTGTGGATATCAAAGCTAATG | |
| GCCCTTCTTCTATTGGTTTGGATTTCTCCTTGCATG | |
| GATTTGAGCATCTTTATGGGATCCCACAACATGCAG | |
| AATCACACCAACTTAAAAATACTGGTGATGGAGATG | |
| CTTACCGTCTTTATAACCTGGATGTCTATGGATACC | |
| AAATATATGATAAAATGGGCATTTATGGTTCAGTAC | |
| CTTATCTCCTGGCCCACAAACTGGGCAGAACTATAG | |
| GTATTTTCTGGCTGAATGCCTCGGAAACACTGGTGG | |
| AGATCAATACAGAGCCTGCAGTAGAGTACACACTGA | |
| CCCAGATGGGCCCAGTTGCTGCTAAACAAAAGGTCA | |
| GATCTCGCACTCATGTGCACTGGATGTCAGAGAGTG | |
| GCATCATTGATGTTTTTCTGCTGACAGGACCTACAC | |
| CTTCTGATGTCTTCAAACAGTACTCACACCTTACAG | |
| GCACACAAGCCATGCCCCCTCTTTTCTCTTTGGGAT | |
| ACCACCAGTGCCGCTGGAACTATGAAGATGAGCAGG | |
| ATGTAAAAGCAGTGGATGCAGGGTTTGATGAGCATG | |
| ACATTCCTTATGATGCCATGTGGCTGGACATAGAGC | |
| ACACTGAGGGCAAGAGGTACTTCACCTGGGACAAAA | |
| ACAGATTCCCAAACCCCAAGAGGATGCAAGAGCTGC | |
| TCAGGAGCAAAAAGCGTAAGCTTGTGGTCATCAGTG | |
| ATCCCCACATCAAGATTGATCCTGACTACTCAGTAT | |
| ATGTGAAGGCCAAAGATCAGGGCTTCTTTGTGAAGA | |
| ATCAGGAAGGGGAAGACTTTGAAGGGGTGTGTTGGC | |
| CAGGTCTCTCCTCTTACCTGGATTTCACCAATCCCA | |
| AGGTCAGAGAGTGGTATTCAAGTCTTTTTGCTTTCC | |
| CTGTTTATCAGGGATCTACGGACATCCTCTTCCTTT | |
| GGAATGACATGAATGAGCCTTCTGTCTTTAGAGGGC | |
| CAGAGCAAACCATGCAGAAGAATGCCATTCATCATG | |
| GCAATTGGGAGCACAGAGAGCTCCACAACATCTACG | |
| GTTTTTATCATCAAATGGCTACTGCAGAAGGACTGA | |
| TAAAACGATCTAAAGGGAAGGAGAGACCCTTTGTTC | |
| TTACACGTTCTTTCTTTGCTGGATCACAAAAGTATG | |
| GTGCCGTGTGGACAGGCGACAACACAGCAGAATGGA | |
| GCAACTTGAAAATTTCTATCCCAATGTTACTCACTC | |
| TCAGCATTACTGGGATCTCTTTTTGCGGAGCTGACA | |
| TAGGCGGGTTCATTGGGAATCCAGAGACAGAGCTGC | |
| TAGTGCGTTGGTACCAGGCTGGAGCCTACCAGCCCT | |
| TCTTCCGTGGCCATGCCACCATGAACACCAAGCGAC | |
| GAGAGCCCTGGCTCTTTGGGGAGGAACACACCCGAC | |
| TCATCCGAGAAGCCATCAGAGAGCGCTATGGCCTCC | |
| TGCCATATTGGTATTCTCTGTTCTACCATGCACACG | |
| TGGCTTCCCAACCTGTCATGAGGCCTCTGTGGGTAG | |
| AGTTCCCTGATGAACTAAAGACTTTTGATATGGAAG | |
| ATGAATACATGCTGGGGAGTGCATTATTGGTTCATC | |
| CAGTCACAGAACCAAAAGCCACCACAGTTGATGTGT | |
| TTCTTCCAGGATCAAATGAGGTCTGGTATGACTATA | |
| AGACATTTGCTCATTGGGAAGGAGGGTGTACTGTAA | |
| AGATCCCAGTAGCCTTGGACACTATTCCAGTGTTTC | |
| AGCGAGGTGGAAGTGTGATACCAATAAAGACAACTG | |
| TAGGAAAATCCACAGGCTGGATGACTGAATCCTCCT | |
| ATGGACTCCGGGTTGCTCTAAGCACTAAGGGTTCTT | |
| CAGTGGGTGAGTTATATCTTGATGATGGCCATTCAT | |
| TCCAATACCTCCACCAGAAGCAATTTTTGCACAGGA | |
| AGTTTTCATTCTGTTCCAGTGTTCTGATCAATAGTT | |
| TTGCTGACCAGAGGGGTCATTATCCCAGCAAGTGTG | |
| TGGTGGAGAAGATCTTGGTCTTAGGCTTCAGGAAGG | |
| AGCCATCTTCTGTGACTACCCACTCATCTGATGGTA | |
| AAGATCAGCCTGTGGCTTTTACGTATTGTGCCAAAA | |
| CATCCATCCTGAGCCTGGAGAAGCTCTCACTCAACA | |
| TTGCCACTGACTGGGAGGTCCGCATCATATGACAAA | |
| GAACTGCCCCTGGTGATGTGAGCAGGGACCTGCCTG | |
| CCCCTTTCAACCTTTCCCCTCACCTTTTTTGAGATT | |
| TTTGCTGCAATCTGTTTGCCTTCCCTGAATCAAAAT | |
| AATCTTTCATTCGTCACCATTATACTAATGAACAAT | |
| AGATTTCATGTTTCAAAATTTCAGATTTTACATGTT | |
| AAGATGTACTAACAATATTCCTTGTATCAAACATCT | |
| CCTTTTCTCCCTGATACATAGCCCTGAGACATTTAT | |
| AGCGTTCAGGAGTCTTCTATTGCTTCCATTCCTTCA | |
| GCAGGGCTGCGTGGGTCTGTTTTAACGTGGGCCAAG | |
| CCTACCTGGGCAGCCCATTTGCCAGGGCTTGCCTCA | |
| GGCCATGCAGCATTGGCGCTCTGGCTGCAGCAGCTG | |
| AGTTGCTCAAGGCCAGTGTCCAAGTGGACAGCAGCC | |
| TCTGGTACTCCCCCCAGTTATCTTCCACCCACATGG | |
| ACTGGGCAGAGCAGCCCTCTTCTGTGTGCACTGCAT | |
| ACGCTGCAGCCGTGGGAGTTATTCTCCCCTAGAGAT | |
| CGACTTGGCAGCACGAAGGATTCTTTTCTCTTTCAT | |
| GCTTCTCAGGCTCAATAGTTTCTAATTAATCTTAAA | |
| ATCCATGTCTTTTACATTGTTTTTTTAATTAAGTGC | |
| TGTTTACTAACCAAATAATATTTATAACATGAGTAA | |
| GCTATAATTAATAACAATGAAATAAATACCCATGTA | |
| CCCACCACTGGACTTCAGAAGTAGAACTCATGACTG | |
| GGACTAGGATGAGGCAAGGGAGACCCTGGCCTTGGG | |
| CACAAAATGTAAGGGATGCCAAAAAAATACAGTAAT | |
| CAAAGTAAGTAATATTTCAATCCAATATTTTTAAAA | |
| ATCAGAATTAATGCAAAAAAAACCATGATGAACAAA | |
| ATATTAAAATTTAAAATAAAGACAGGATTAGTATTA | |
| CTGAGTTTTCCTTTTGTCCCAGGCTTTAATATGGCT | |
| TGGCATGGGGCAGAACATTACAACATACCAGTCGTG | |
| TCATGGTGCCCAAGGCTCCACAGACCTCAGTGGCTC | |
| CCTGCTGCCTGCCACAGCATCTGTTTTAGCAGCCTC | |
| GACTCCTCAGCACTCCTCAGCACACACCTCTTCTTA | |
| TCAGGCTTCCTCCACTTAGCAACTTGCTAACGGCCA | |
| CCTCTGTGCCTTCTGATCCCTGGGCGCCAATATCCT | |
| CCTGCCCTTACCATCCTTCCAGGCCCAACTTAAATC | |
| CCACTTTCCCATGAAGCCTAACTGCGTGAACACCCC | |
| TACCCCCATACCCATTAGCAGTGATTTTGCCCTTCC | |
| CCGTAATGCTGTCCCACTTATAACTGTGCTCTACTT | |
| AGCATTCTCAGGGATCATACCTTAATGTTTTCAGTA | |
| TGTCTGCGTTCTCCTACTAGATTGTATGTCCCTCAA | |
| GAGCATGTTCTGTTTCTCTTCTGTCTGACAGAGCAC | |
| TATTATACCTGACTTTCAGTAACTGTTAGCTGTGAT | |
| TAGTTAGCTGGTGGATTTAATTGATTAAAAAATTAC | |
| GATTGAATGTAAAAAAAAA | |

[0289] In a search of public sequence databases, the NOV11b nucleic acid sequence, located on chromosome 15 has 1459 of 2258 bases (64%) identical to a gb:GENBANK-ID:MMU92793|acc:U92793.1 mRNA from Mus musculus (Mus musculus alpha glucosidase II alpha subunit mRNA, complete cds) (E=7.2e⁻¹⁴⁷). Public nucleotide databases include all GenBank databases and the GeneSeq patent database.

[0290] The disclosed NOV11b polypeptide (SEQ ID NO: 40) encoded by SEQ ID NO: 39 has 914 amino acid residues and is presented in Table 11D using the one-letter amino acid code. Signal P, Psort and/or Hydropathy results predict that NOV11b has no signal peptide and is likely to be localized in the endoplasmic reticulum (membrane) with a certainty of 0.8500. In other embodiments, NOV11b may also be localized to the microbody (peroxisome) with a certainty of 0.7480, the plasma membrane with a certainty of 0.4400, or in the mitochondrial inner membrane with a certainty of 0.1000.

TABLE 11D
Encoded NOV11b protein sequence.

| | |
|---|---|
| MEAAVKEEISVEDEAVDKNIFRDCNKIAFYRRQKQW | (SEQ ID NO:40) |
| LSKKSTYQALLDSVTTDEDSTRFQIINEASKVPLLA | |
| EIYGIEGNIFRLKINEETPLKPRFEVPDVLTSKPST | |
| VRLISCSGDTGSLILADGKGDLKCHITANPFKVDLV | |
| SEEEVVISINSLGQLYFEHLQILHKQRAAKENEEET | |
| SVDTSQENQEDLGLWEEKFGKFVDIKANGPSSIGLD | |
| FSLHGFEHLYGIPQHAESHQLKNTGDGDAYRLYNLD | |
| VYGYQIYDKMGIYGSVPYLLAHKLGRTIGIFWLNAS | |
| ETLVEINTEPAVEYTLTQMGPVAAKQKVRSRTHVHW | |
| MSESGIIDVFLLTGPTPSDVFKQYSHLTGTQAMPPL | |
| FSLGYHQCRWNYEDEQDVKAVDAGFDEHDIPYDAMW | |
| LDIEHTEGKRYFTWDKNRFPNPKRMQELLRSKKRKL | |
| VVISDPHIKIDPDYSVYVKAKDQGFFVKNQEGEDFE | |
| GVCWPGLSSYLDFTNPKVREWYSSLFAFPVYQGSTD | |
| ILFLWNDMNEPSVFRGPEQTMQKNAIHHGNWEHREL | |
| HNIYGFYHQMATAEGLIKRSKGKERPFVLTRSFFAG | |
| SQKYGAVWTGDNTAEWSNLKISIPMLLTLSITGISF | |
| CGADIGGFIGNPETELLVRWYQAGAYQPFFRGHATM | |
| NTKRREPWLFGEEHTRLIREAIRERYGLLPYWYSLF | |
| YHAHVASQPVMRPLWVEFPDELKTFDMEDEYMLGSA | |
| LLVHPVTEPKATTVDVFLPGSNEVWYDYKTFAHWEG | |
| GCTVKIPVALDTIPVFQRGGSVIPIKTTVGKSTGWM | |
| TESSYGLRVALSTKGSSVGELYLDDGHSFQYLHQKQ | |
| FLHRKFSFCSSVLINSFADQRGHYPSKCVVEKILVL | |
| GFRKEPSSVTTHSSDGKDQPVAFTYCAKTSILSLEK | |
| LSLNIATDWEVRII | |

[0291] A search of sequence databases reveals that the NOV11b amino acid sequence has 466 of 912 amino acid residues (51%) identical to, and 640 of 912 amino acid residues (70%) similar to, the 944 amino acid residue ptnr:SPTREMBL-ACC:P79403 protein from Sus scrofa (Pig) (Glucosidase II) (E=7.1e⁻²⁶⁰). Public amino acid databases include the GenBank databases, SwissProt, PDB and PIR.

[0292] NOV11b is expressed in at least Adrenal Gland/Suprarenal gland, Aorta, Brain, Hippocampus, Kidney, Lung, Lymph node, Ovary, Parathyroid Gland, Prostate, Salivary Glands, Thyroid, Tonsils, Trachea, Uterus. Expression information was derived from the tissue sources of the sequences that were included in the derivation of the sequence of NOV11b. The sequence is predicted to be expressed in T cells because of the expression pattern of (GENBANK-ID: gb:GENBANK-ID:MMU92793|acc:U92793.1) a closely related Mus musculus alpha glucosidase II alpha subunit mRNA, complete cds.

[0293] NOV11c

[0294] A disclosed NOV11c nucleic acid of 3015 nucleotides (also referred to as CG55752-03) encoding a novel Glucosidase II-like protein is shown in Table 11E. An open reading frame was identified beginning with an ATG initiation codon at nucleotides 204-206 and ending with a TGA codon at nucleotides 2946-2948. A putative untranslated region upstream from the initiation codon is underlined in Table 11E. The start and stop codons are in bold letters.

TABLE 11A
NOV11c nucleotide sequence.

| | |
|---|---|
| AACGCTAGTTTGGGCCTGAAAAATTCCAGGAGCAAG | (SEQ ID NO:41) |
| AGTCAAGATTTGTCACTCCATGAGAATCTGGAGGGG | |
| ACTCCCTTCCCAGAAACTTGACGATGAAGTACTGGT | |
| TGTAATTTTAGAAAGACACCCAATCGGCTTTTTTAA | |
| AAGATCGCCCAGGGCCCTTGTCCTGAGAGCTGGGAG | |
| CTGGTCGGAGTGACAGAGAAGCCATGGAAGCAGCAG | |
| TGAAAGAGGAAATAAGTGTTGAAGATGAAGCTGTAG | |
| ATAAAAACATTTTCAGAGACTGTAACAAGATCGCAT | |
| TTTACAGGCGTCAGAAACAGTGGCTTTCCAAGAAGT | |
| CCACCTATCAGGCATTATTGGATTCAGTCACAACAG | |
| ATGAAGACAGCACCAGGTTCCAAATCATCAATGAAG | |
| CAAGTAAGGTTCCTCTCCTGGCTGAAATTTATGGTA | |
| TAGAAGGAAACATTTTCAGGCTTAAAATTAACGAAG | |
| AGACTCCTCTAAAACCCAGATTTGAAGTTCCGGATG | |
| TCCTCACAAGCAAGCCAAGCACTGTAAGGCTGATTT | |
| CATGCTCTGGGGACACAGGCAGTCTGATATTGGCAG | |
| ATGGAAAAGGAGACCTGAAGTGCCATATCACAGCAA | |
| ACCCATTCAAGGTAGACTTGGTGTCTGAAGAAGAGG | |
| TTGTGATTAGCATAAATTCCCTGGGCCAATTATACT | |
| TTGAGCATCTACAGATTCTTCACAAACAAAGAGCTG | |
| CTAAAGAAAATGAGGAGGAGACATCAGTGGACACCT | |
| CTCAGGAAAATCAAGAAGATCTGGGCCTGTGGGAAG | |
| AGAAATTTGGAAAATTTGTGGATATCAAAGCTAATG | |
| GCCCTTCTTCTATTGGTTTGGATTTCTCCTTGCATG | |
| GATTTGAGCATCTTTATGGGATCCCACAACATGCAG | |
| AATCACACCAACTTAAAAATACTGGTGATGGAGATG | |
| CTTACCGTCTTTATAACCTGGATGTCTATGGATACC | |
| AAATATATGATAAAATGGGCATTTATGGTTCAGTAC | |
| CTTATCTCCTGGCCCACAAACTGGGCAGAACTATAG | |
| GTATTTTCTGGCTGAATGCCTCGGAAACACTGGTGG | |
| AGATCAATACAGAGCCTGCAGTAGAGTACACACTGA | |
| CCCAGATGGGCCCAGTTGCTGCTAAACAAAAGGTCG | |
| GATCTCGCACTCATGTGCACTGGATGTCAGAGAGTG | |
| GCATCATTGATGTTTTTCTGCTGACAGGACCTACAC | |
| CTTCTGATGTCTTCAAACAGTACTCACACCTTACAG | |
| GCACACAAGCCATGCCCCCTCTTTTCTCTTTGGGAT | |
| ACCACCAGTGCCGCTGGAACTATGAAGATGAGCAGG | |
| ATGTAAAAGCAGTGGATGCAGGGTTTGATGAGCATG | |
| ACATTCCTTATGATGCCATGTGGCTGGACATAGAGC | |
| ACACTGAGGGCAAGAGGTACTTCACCTGGGACAAAA | |
| ACAGATTCCCAAACCCCAAGAGGATGCAAGAGCTGC | |
| TCAGGAGCAAAAAGCGTAAGCTTGTGGTCATCAGTG | |
| ATCCCCACATCAAGATTGATCCTGACTACTCAGTAT | |
| ATGTGAAGGCCAAAGATCAGGGCTTCTTTGTGAAGA | |
| ATCAGGAAGGGGAAGACTTTGAAGGGGTGTGTTGGC | |
| CAGGTCTCTCCTCTTACCTGGATTTCACCAATCCCA | |
| AGGTCAGAGAGTGGTATTCAAGTCTTTTTGCTTTCC | |
| CTGTTTATCAGGGATCTACGGACATCCTCTTCCTTT | |
| GGAATGACATGAATGAGCCTTCTGTCTTTAGAGGGC | |
| CAGAGCAAACCATGCAGAAGAATGCCATTCATCATG | |
| GCAATTGGGAGCACAGAGAGCTCCACAACATCTACG | |
| GTTTTTATCATCAAATGGCTACTGCAGAAGGACTGA | |
| TAAAACGATCTAAAGGGAAGGAGAGACCCTTTGTTC | |
| TTACACGTTCTTTCTTTGCTGGATCACAAAAGTATG | |
| GTGCCGTGTGGACAGGCGACAACACAGCAGAATGGA | |
| GCAACTTGAAAATTTCTATCCCAATGTTACTCACTC | |
| TCAGCATTACTGGGGTCTCTTTTTGCGGAGCTGACA | |
| TAGGCGGGTTCATTGGGAATCCAGAGACAGAGCTGC | |
| TAGTGCGTTGGTACCAGGCTGGAGCCTACCAGCCCT | |
| TCTTCCGTGGCCATGCCACCATGAACACCAAGCGAC | |
| GAGAGCCCTGGCTCTTTGGGGAGGAACACACCCGAC | |
| TCATCCGAGAAGCCATCAGAGAGCGCTATGGCCTCC | |
| TGCCATATTGGTATTCTCTGTTCTACCATGCACACG | |
| TGGCTTCCCAACCTGTCATGAGGCCTCTGTGGGTAG | |
| AGTTCCCTGATGAACTAAAGACTTTTGATATGGAAG | |
| ATGAATACATGCTGGGGAGTGCATTATTGGTTCATC | |
| CAGTCACAGAACCAAAAGCCACCACAGTTGATGTGT | |
| TTCTTCCAGGATCAAATGAGGTCTGGTATGACTATA | |
| AGACATTTGCTCATTGGGAAGGAGGGTGTACTGTAA | |
| AGATCCCAGTAGCCTTGGACACTATTCCAGTGTTTC | |
| AGCGAGGTGGAAGTGTGATACCAATAAAGACAACTG | |
| TAGGAAAATCCACAGGCTGGATGACTGAATCCTCCT | |
| ATGGACTCCGGGTTGCTCTAAGCACTAAGGGTTCTT | |
| CAGTGGGTGAGTTATATCTTGATGATGGCCATTCAT | |
| TCCAATACCTCCACCAGAAGCAATTTTTGCACAGGA | |
| AGTTTTCATTCTGTTCCAGTGTTCTGATCAATAGTT | |
| TTGCTGACCAGAGGGGTCACTATCCCAGCAAGTGTG | |
| TGGTGGAGAAGATCTTGGTCTTAGGCTTCAGGAAGG | |
| AGCCATCTTCTGTGACTACCCACTCATCTGATGGTA | |
| AAGATCAGCCTGTGGCTTTTACGTATTGTGCCAAAA | |
| CATCCATCCTGAGCCTGGAGAAGCTCTCACTCAACA | |
| TTGCCACTGACTGGGAGGTCCGCATCATATGACAAA | |
| GAACTGCCCCTGGTGATGTGAGCAGGGACCTGCCTG | |
| CCCCTTTCAACCTTTCCCCTCACCTTT | |

[0295] In a search of public sequence databases, the NOV11c nucleic acid sequence, located on chromosome 15 has 1459 of 2258 bases (64%) identical to a gb:GENBANK-ID:MMU92793|acc:U92793.1 mRNA from Mus musculus (Mus musculus alpha glucosidase II alpha subunit mRNA, complete cds) (E=7.2e⁻¹⁴⁷). Public nucleotide databases include all GenBank databases and the GeneSeq patent database.

[0296] The disclosed NOV11c polypeptide (SEQ ID NO: 42) encoded by SEQ ID NO: 41 has 914 amino acid residues and is presented in Table 11F using the one-letter amino acid code. Signal P, Psort and/or Hydropathy results predict that NOV11c has no signal peptide and is likely to be localized in the microbody (peroxisome) with a certainty of 0.7480. In other embodiments, NOV11c may also be localized to the nucleus with a certainty of 0.3000, the mitochondrial membrane space with a certainty of 0.1000, or in the lysosome (lumen) with a certainty of 0.1000.

TABLE 11F
Encoded NOV11c protein sequence.

| | |
|---|---|
| MEAAVKEEISVEDEAVDKNIFRDCNKIAFYRRQKQW | (SEQ ID NO:42) |
| LSKKSTYQALLDSVTTDEDSTRFQIINEASKVPLLA | |
| EIYGIEGNIFRLKINEETPLKPRFEVPDVLTSKPST | |
| VRLISCSGDTGSLILADGKGDLKCHITANPFKVDLV | |
| SEEEVVISINSLGQLYFEHLQILHKQRAAKENEEET | |
| SVDTSQENQEDLGLWEEKFGKFVDIKANGPSSIGLD | |
| FSLHGFEHLYGIPQHAESHQLKNTGDGDAYRLYNLD | |
| VYGYQIYDKMGIYGSVPYLLAHKLGRTIGIFWLNAS | |
| ETLVEINTEPAVEYTLTQMGPVAAKQKVGSRTHVHW | |
| MSESGIIDVFLLTGPTPSDVFKQYSHLTGTQAMPPL | |
| FSLGYHQCRWNYEDEQDVKAVDAGFDEHDIPYDAMW | |
| LDIEHTEGKRYFTWDKNRFPNPKRMQELLRSKKRKL | |
| VVISDPHIKIDPDYSVYVKAKDQGFFVKNQEGEDFE | |
| GVCWPGLSSYLDFTNPKVREWYSSLFAFPVYQGSTD | |
| ILFLWNDMNEPSVFRGPEQTMQKNAIHHGNWEHREL | |
| HNIYGFYHQMATAEGLIKRSKGKERPFVLTRSFFAG | |
| SQKYGAVWTGDNTAEWSNLKISIPMLLTLSITGVSF | |
| CGADIGGFIGNPETELLVRWYQAGAYQPFFRGHATM | |
| NTKRREPWLFGEEHTRLIREAIRERYGLLPYWYSLF | |
| YHAHVASQPVMRPLWVEFPDELKTFDMEDEYMLGSA | |
| LLVHPVTEPKATTVDVFLPGSNEVWYDYKTFAHWEG | |
| GCTVKIPVALDTIPVFQRGGSVIPIKTTVGKSTGWM | |
| TESSYGLRVALSTKGSSVGELYLDDGHSFQYLHQKQ | |
| FLHRKFSFCSSVLINSFADQRGHYPSKCVVEKILVL | |
| GFRKEPSSVTTHSSDGKDQPVAFTYCAKTSILSLEK | |
| LSLNIATDWEVRII | |

[0297] A search of sequence databases reveals that the NOV11c amino acid sequence has 467 of 912 amino acid residues (51%) identical to, and 640 of 912 amino acid residues (70%) similar to, the 944 amino acid residue ptnr:SPTREMBL-ACC:P79403 protein from Sus scrofa (Pig) (Glucosidase II) (E=7.3e⁻²⁶⁰). Public amino acid databases include the GenBank databases, SwissProt, PDB and PIR.

[0298] NOV11c is expressed in at least Adrenal Gland/Suprarenal gland, Aorta, Brain, Hippocampus, Kidney, Lung, Lymph node, Ovary, Parathyroid Gland, Prostate, Salivary Glands, Thyroid, Tonsils, Trachea, Uterus. Expression information was derived from the tissue sources of the sequences that were included in the derivation of the sequence of NOV11c.

[0299] NOV11d

[0300] A disclosed NOV11d nucleic acid of 3102 nucleotides (also referred to as CG55752-04) encoding a novel Glucosidase II-like protein is shown in Table 11G. An open reading frame was identified beginning with an ATG initiation codon at nucleotides 103-105 and ending with a TGA codon at nucleotides 2839-2841. A putative untranslated region upstream from the initiation codon is underlined in Table 11G. The start and stop codons are in bold letters.

TABLE 11G
NOV11d nucleotide sequence.

| | |
|---|---|
| TACTGGTTGTAATTTTAGAAAGACACCCAATCGGCT | (SEQ ID NO:43) |
| TTTTTAAAAGATCGCCCAGGGCCCTTGTCCTGAGAG | |
| CTGGGAGCTGGTCGGAGTGACAGAGAAGCCATGGAA | |
| GCAGCAGTGAAAGAGGAAATAAGTGTTGAAGATGAA | |
| GCTGTAGATAAAAACATTTTCAGAGACTGTAACAAG | |
| ATCGCATTTTACAGGCGTCAGAAACAGTGGCTTTCC | |
| AAGAAGTCCACCTATCGGGCATTATTGGATTCAGTC | |
| ACAACAGATGAAGACAGCACCAGGTTCCAAATCATC | |
| AATGAAGCAAGTAAGGTTCCTCTCCTGGCTGAAATT | |
| TATGGTATAGAAGGAAACATTTTCAGGCTTAAAATT | |
| AACGAAGAGACTCCTCTAAAACCCAGATTTGAAGTT | |
| CCGGATGTCCTCACAAGCAAGCCAAGCACTGTAAGG | |
| CTGATTTCATGCTCTGGGGACACAGGCAGTCTGATA | |
| TTGGCACATGGAAAAGGAGACCTGAAGTGCCATATC | |
| ACAGCAAACCCATTCAAGGTAGACTTGGTGTCTGAA | |
| GAAGAGGTTGTGATTAGCATAAATTCCCTGGGCCAA | |
| TTATACTTTGAGCATCTACAGATTCTTCACAAACAA | |
| AGAGCTGCTAAAGAAAATGAGGAGGAGACATCAGTG | |
| GACACCTCTCAGGAAAATCAAGAAGATCTGGGCCTG | |
| TGGGAAGAGAAATTTGGAAAATTTGTGGATATCAAA | |
| GCTAATGGCCCTTCTTCTATTGGTTTGGATTTCTCC | |
| TTGCATGGATTTGAGCATCTTTATGGGATCCCACAA | |
| CATGCAGAATCACACCAACTTAAAAATACTGGAGAT | |
| GCTTACCGTCTTTATAACCTGGATGTCTATGGATAC | |
| CAAATATATGATAAAATGGGCATTTATGGTTCAGTA | |
| CCTTATCTCCTGGCCCACAAACTGGGCAGAACTATA | |
| GCTATTTTCTGGCTGAATGCCTCGGAAACACTGGTG | |
| GAGATCAATACAGAGCCTGCAGTAGAGTACACACTG | |
| ACCCAGATGGGCCCAGTTGCTGCTAAACAAAAGGTC | |
| AGATCTCGCACTCATGTGCACTGGATGTCAGAGAGT | |
| GGCATCATTGATGTTTTTCTGCTGACAGGACCTACA | |
| CCTTCTGATGTCTTCAAACAGTACTCACACCTTACA | |
| GGTACGCAAGCCATGCCCCCTCTTTTCTCTTTGGGA | |
| TACCACCAGTGCCGCTGGAACTATGAAGATGAGCAG | |
| GATGTAAAAGCAGTGGATGCAGGGTTTGATGAGCAT | |
| GACATTCCTTATGATGCCATGTGGCTGGACATAGAG | |
| CACACTGAGGGCAAGAGGTACTTCACCTGGGACAAA | |
| AACAGATTCCCAAACCCCAAGAGGATGCAAGAGCTG | |
| CTCAGGAGCAAAAAGCGTAAGCTTGTGGTCATCAGT | |
| GATCCCCACATCAAGATTGAACCTGACTACTCAGTA | |
| TATGTGAAGGCCAAAGATCAGGGCTTCTTTGTGAAG | |
| AATCAGGAAGGGGAAGACTTTGAAGGGGTGTGTTGG | |
| CCAGGTCTCTCCTCTTACCTGGATTTCACCAATCCC | |
| AAGGTCAGAGAGTGGTATTCAAGTCTTTTTGCTTTC | |
| CCTGTTTATCAGGGATCTACGGACATCCTCTTCCTT | |
| TGGAATGACATGAATGAGCCTTCTGTCTTTAGAGGG | |
| CCAGAGCAAACCATGCAGAAGAATGCCATTCATCAT | |
| GGCAATTGGGAGCACAGAGAGCTCCACAACATCTAC | |
| GGTTTTTATCATCAAATGGCTACTGCAGAAGGACTG | |
| ATAAAACGATCTAAAGGGAAGGAGAGACCCTTTGTT | |
| CTTACACGTTCTTTCTTTGCTGGATCACAAAAGTAT | |
| GGTGCCGTGTGGACAGGCGACAACACAGCAGAATGG | |
| AGCAACTTGAAAATTTCTATCCCAATGTTACTCACT | |
| CTCAGCATTACTGGGATCTCTTTTTGCGGAGCTGAC | |
| ATAGGCGGGTTCATTGGGAATCCAGAGACAGAGCTG | |
| CTAGTGCGTTGGTACCAGGCTGGAGCCTACCAGCCC | |
| TTCTTCCGTGGCCATGCCACCATGAACACCAAGCGA | |
| CGAGAGCCCTGGCTCTTTGGGGAGGAACACACCCGA | |
| CTCATCCGAGAAGCCATCAGAGAGCGCTATGGCCTC | |
| CTGCCATATTGGTATTCTCTGTTCTACCATGCACAC | |
| GTGGCTTCCCAACCTGTCATGAGGCCTCTGTGGGTA | |
| GAGTTCCCTGATGAACTAAAGACTTTTGATATGGAA | |
| GATGAATACATGTTAGGGAGTGCATTATTGGTTCAT | |
| CCAGTCACAGAACCAAAAGCCACCACAGTTGATGTG | |
| TTTCTTCCAGGATCAAATGAGGTATGGTATGACTAT | |
| AAGACATTTGCTCATTGGGAAGGAGGGTGTACTGTA | |
| AAGATCCCAGTAGCCTTGGACACTATTCCAGTGTTT | |
| CAGCGAGGTGGAAGTGTGATACCAATAAAGACAACT | |
| GTAGGAAAATCCACAGGCTGGATGACTGAATCCTCC | |
| TATGGACTCCGGGTTGCTCTAAGCACTCAGGGTTCT | |
| TCAGTGGGTGAGTTATATCTTGATGATGGCCATTCA | |
| TTCCAATACCTCCACCAGAAGCAATTTTTGCACAGG | |
| AAGTTTTCATTCTGTTCCAGTGTTCTGATCAATAGT | |
| TTTGCTGACCAGAGGGGTCATTATCCCAGCAAGTGT | |
| GTGGTGGAGAAGATCTTGGTCTTAGGCTTCAGGAAG | |
| GAGCCATCTTCTGTGACTACCCACTCATCTGATGGT | |
| AAAGATCAGCCTGTGGCTTTTACGTATTGTGCCAAA | |
| ACATCCATCCTGAGCCTGGAGAAGCTCTCACTCAAC | |
| ATTGCCACTGACTGGGAGGTCCGCATCATATGACAA | |
| AGAACTGCCCCTGGTGATGTGAGCAGGGACCTGCCT | |
| GCCCCTTTCAACCTTTCCCCTCACCTTTTTTGAGAT | |
| TTTTGCTGCAATCTGTTTGTCTTCCCTGAATCAAAA | |
| TAATCTTTCATTCGTCACCATTATACTAATGAACAA | |
| TAGATTTCATGTTTCAAAATTTCAGATTTTACATGT | |
| TAAGATGTACTAACAATATTCCTTGTATCAAACATC | |
| TCCTTTTCTCCCTGATACATAGCCCTGAGACATTAT | |
| AGCGTC | |

[0301] In a search of public sequence databases, the NOV11d nucleic acid sequence, located on chromosome 15 has 1427 of 2214 bases (64%) identical to a gb:GENBANK-ID:MMU92793|acc:U92793.1 mRNA from Mus musculus (Mus musculus alpha glucosidase II alpha subunit mRNA, complete cds) (E=5.9e⁻¹⁴⁴). Public nucleotide databases include all GenBank databases and the GeneSeq patent database.

[0302] The disclosed NOV11d polypeptide (SEQ ID NO: 44) encoded by SEQ ID NO: 43 has 912 amino acid residues and is presented in Table 11H using the one-letter amino acid code. Signal P, Psort and/or Hydropathy results predict that NOV11d has no signal peptide and is likely to be localized in the endoplasmic reticulum (membrane) with a certainty of 0.8500. In other embodiments, NOV11d may also be localized to the microbody (peroxisome) with a certainty of 0.7480, the plasma membrane with a certainty of 0.4400, or in the mitochondrial inner membrane with a certainty of 0.1000.

TABLE 11H
Encoded NOV11d protein sequence.

| | |
|---|---|
| MEAAVKEEISVEDEAVDKNIFRDCNKIAFYRRQKQW | (SEQ ID NO:44) |
| LSKKSTYRALLDSVTTDEDSTRFQIINEASKVPLLA | |
| EIYGIEGNIFRLKINEETPLKPRFEVPDVLTSKPST | |
| VRLISCSGDTGSLILADGKGDLKCHITANPFKVDLV | |
| SEEEVVISINSLGQLYFEHLQILHKQRAAKENEEET | |
| SVDTSQENQEDLGLWEEKFGKFVDIKANGPSSIGLD | |
| FSLHGFEHLYGIPQHAESHQLKNTGDAYRLYNLDVY | |
| GYQIYDKMGIYGSVPYLLAHKLGRTIGIFWLNASET | |
| LVEINTEPAVEYTLTQMGPVAAKQKVRSRTHVHWMS | |
| ESGIIDVFLLTGPTPSDVFKQYSHLTGTQAMPPLFS | |
| LGYHQCRWNYEDEQDVKAVDAGFDEHDIPYDAMWLD | |
| IEHTEGKRYFTWDKNRFPNPKRMQELLRSKKRKLVV | |
| ISDPHIKIEPDYSVYVKAKDQGFFVKNQEGEDFEGV | |
| CWPGLSSYLDFTNPKVREWYSSLFAFPVYQGSTDIL | |
| FLWNDMNEPSVFRGPEQTMQKNAIHHGNWEHRELHN | |
| IYGFYHQMATAEGLIKRSKGKERPFVLTRSFFAGSQ | |
| KYGAVWTGDNTAEWSNLKISIPMLLTLSITGISFCG | |
| ADIGGFIGNPETELLVRWYQAGAYQPFFRGHATMNT | |
| KRREPWLFGEEHTRLIREAIRERYGLLPYWYSLFYH | |
| AHVASQPVMRPLWVEFPDELKTFDMEDEYMLGSALL | |
| VHPVTEPKATTVDVFLPGSNEVWYDYKTFAHWEGGC | |
| TVKIPVALDTIPVFQRGGSVIPIKTTVGKSTGWMTE | |
| SSYGLRVALSTQGSSVGELYLDDGHSFQYLHQKQFL | |
| HRKFSFCSSVLINSFADQRGHYPSKCVVEKILVLGF | |
| RKEPSSVTTHSSDGKDQPVAFTYCAKTSILSLEKLS | |
| LNIATDWEVRII | |

[0303] A search of sequence databases reveals that the NOV11d amino acid sequence has 636 of 653 amino acid residues (97%) identical to, and 644 of 653 amino acid residues (98%) similar to, the 653 amino acid residue ptnr:TREMBLNEW-ACC:BAB39324 protein from Macaca fascicularis (Crab eating macaque) (Cynomolgus monkey) (Hypothetical 74.7 KDA Protein) (E=0.0). Public amino acid databases include the GenBank databases, SwissProt, PDB and PIR.

[0304] NOV11d is expressed in at least the adrenal gland, bone marrow, brain—amygdala, brain—cerebellum, brain—hippocampus, brain—substantia nigra, brain—thalamus, brain—whole, fetal brain, fetal kidney, fetal liver, fetal lung, heart, kidney, lymphoma—Raji, mammary gland, pancreas, pituitary gland, placenta, prostate, salivary gland, skeletal muscle, small intestine, spinal cord, spleen, stomach, testis, thyroid, trachea and uterus. Expression information was derived from the tissue sources of the sequences that were included in the derivation of the sequence of NOV11d.

[0305] The disclosed NOV11 polypeptide has homology to the amino acid sequences shown in the BLASTP data listed in Table 11I.

TABLE 11I
BLAST results for NOV11

| Gene Index/ | | Length | Identity | Positives | |
|---|---|---|---|---|---|
| Identifier | Protein/Organism | (aa) | (%) | (%) | Expect |
| gi\|7672977\|gb\| | glucosidase II | 966 | 547/969 | 706/969 | 0.0 |
| AAF66685.1\| | alpha subunit | | (56%) | (72%) | |
| (AF144074) | [Homo sapiens] | | | | |
| gi\|6679891\|ref\|NP_{—} | alpha glucosidase | 966 | 538/969 | 707/969 | 0.0 |
| 032086.1\| | 2, alpha neutral | | (55%) | (72%) | |
| (NM_008060) | subunit [Mus musculus] | | | | |
| gi\|7661898\|ref\|NP_{—} | KIAA0088 protein; | 944 | 524/969 | 684/969 | 0.0 |
| 055425.1\| | likely ortholog | | (54%) | (70%) | |
| (NM_014610) | of mouse G2an | | | | |
| | alpha glucosidase | | | | |
| | 2, alpha neutral | | | | |
| | subunit [Homo sapiens] | | | | |
| gi\|577295\|dbj\| | The ha1225 gene product | 943 | 524/969 | 684/969 | 0.0 |
| BAA07642.1\| | related to is | | (54%) | (70%) | |
| (D42041) | human | | | | |
| | alpha- | | | | |
| | glucosidase. | | | | |
| | [Homo sapiens] | | | | |
| gi\|1890664\|gb\| | glucosidase II | 944 | 525/969 | 684/969 | 0.0 |
| AAB49757.1\| | [Sus scrofa] | | (54%) | (70%) | |
| (U71273) | | | | | |

[0306] The homology between these and other sequences is shown graphically in the ClustalW analysis shown in Table 11J. In the ClustalW alignment of the NOV11 protein, as well as all other ClustalW analyses herein, the black outlined amino acid residues indicate regions of conserved sequence (i.e., regions that may be required to preserve structural or functional properties), whereas non-highlighted amino acid residues are less conserved and can potentially be altered to a much broader extent without altering protein structure or function.

[image]

[image]

[image]

[image]

[0307] Table 1K lists the domain description from DOMAIN analysis results against NOV11. This indicates that the NOV11 sequence has properties similar to those of other proteins known to contain this domain.

TABLE 11K
Domain Analysis of NOV11

gnl|Pfam|pfam01055, Glyco_hydro_31, Glycosyl hydrolases family 31.
Glycosyl hydrolases are key enzymes of carbohydrate metabolism. Family
31 comprises of enzymes that are, or similar to, alpha-
galactosidases. (SEQ ID NO:125)
CD-Length = 707 residues, 91.9% aligned
Score = 642 bits (1657), Expect = 0.0

| | | | |
|---|---|---|---|
| Query: | 244 | KDEPGAWEETFKTHSDSKPYGPSSIGLDFSLHGFEHLYGIPQHAESHQLKNTGDGDAYRL | 303 |
| | | ++ \|\| + + \| \|\| \|\|+ +\|\| ++\| + \| \| | |
| Sbjct: | 33 | STGDVLFDTTFGP----LVFSDQFLQLSTSLPSEYI-YGLGEHAHKLFRRDTNE--TYTL | 85 |
| Query: | 304 | YNLDVYGYQIYDKMGIYGSVPYLLAHK-LGRTIGIFWLNASETLVEINTEPAGIVIFGPV | 362 |
| | | +\| \|\| \| + + \|\|\| \|+ ++ + \| \|+\| \|\|++ \|+\| \|\| | |
| Sbjct: | 86 | WNRDVGPYSGDNNL--YGSHPFYMSLEDSGNAHGVFLLNSNAMEVDIGPGPA-------- | 135 |
| Query: | 363 | SLIYQSQGDTPLTTHVHWMSESGIIDVFLLTGPTPSDVFKQYSHLTGTQAMPPLFSLGYH | 422 |
| | | + + \|\|+\| + \|\|\|\| \|\| +\|\|+ \| \| \|+\|\| +\|\|\|+\| | |
| Sbjct: | 136 | ---------------LTYRVIGGILDFYFFLGPTPEDVLQQYTELIGRPALPPYWSLGFH | 180 |
| Query: | 423 | QCRWNYEDEQDVKAVDAGFDEHDIPYDAMWLDIEHTEGKRYFTWDKNRFPNPKRMQELLR | 482 |
| | | \|\|\| \| + +\|\| \| \| + +\|\| \| \|\|\|\|++ +\| + \|\|\|\| \|\|\| \|+ + \| | |
| Sbjct: | 181 | LCRWGYTNVSEVKTVVDGMRKANIPLDVQWLDIDYMDGYKDFTWDPVRFPGPEDFVKKLH | 240 |
| Query: | 483 | SKKRKLVVISDPHIKIEPD-YSVYVKAKDQGFFVKNQEGEDFEGVCWPGMKSYLDFTNPK | 541 |
| | | +\| +\| \|\|\| \|\| \| ++ \| \| + \|++\| \|\|\|\| \| \|+ \| \|\|\| ++ \|\|\|\|\|+ | |
| Sbjct: | 241 | AKGQKYVVILDPAISVDSASYYPYERGKEKGVFVKNPNGSDYIGEVWPGYTAFPDFTNPE | 300 |
| Query: | 542 | VREWYSSMFSSNCDGSTDILFLWNDMNEPSVFRGP----------------------EQT | 579 |
| | | \|+\|++ \| \| +\| \|\|\|\|\|\| \| \| +\| | |
| Sbjct: | 301 | ARKWWADEIKDFHD-SLPFDGIWIDMNEPSSFSEPGPNDSNLNYPPYAPNDGDGPLSSKT | 359 |
| Query: | 580 | MQKNAIHHGNWEHRELHNIYGFYM--ATAEGLIKRSKGKERPFVLTRSFFAGSQKYGAVW | 637 |
| | | \| +\|+\|+\| \|\| ++\|\|+\|\| \|\| \| \| \| + \|\| \|\|\|\|\|+\|\| \|\|\|\| +\| \| | |
| Sbjct: | 360 | MCMDAVHYGGVEHYDVHNLYGLSEAKATYEALKKVTGGK-RPFVLSRSTFAGSGRYAGHW | 418 |
| Query: | 638 | TGDNTAEWSNLKISIPMLLTLSITGISFCGADIGGFIGNPETELLVRWYQAGAYQPFFRG | 697 |
| | | \|\|\|\|\|\| \| +\|\| \|\|\| +\|+ ++ \|\| \| \|\|\|\| \|\| \|\| \|\| \|\|\| \| \|\|+ \|\| \| | |
| Sbjct: | 419 | TGDNTASWDDLKYSIPGVLSFNLFGIPFVGADICGFNGNTTEELCVRWMQLGAFYPFSRN | 478 |
| Query: | 698 | HATMNTKRREPWLFGEEHTRLIREAIRERYGLLPYWYSLFYHAHVASQPVMRPLWVEFPD | 757 |
| | | \| + \| +\|\|\|\|\| \|+\|+ \|\| \|\|\|\| \|+\|\|+ \|\|\|+ \|\|\|\|\|\|+ \|\|\|\| | |
| Sbjct: | 479 | HNHLGTIPQEPWLFDSVAAEASRKALNLRYTLLPYLYTLFHEAHVSGLPVMRPLFFEFPD | 538 |
| Query: | 758 | ELKTFDMEDEYMLGSALLVHPVTEPKATTVDVFLPGSNEVVWYDYKTFA--HWEGGCTVK | 815 |
| | | + +\|+\|++ +++ \|\|\|\|\|\| \|\| \|\| \|\|+\| +\|\|\| \|\|\| \| \| \|\| | |
| Sbjct: | 539 | DAETYDIDRQFLWGSALLVAPVLEPGATSVKAYLPGGR---WYDLYTGAGEASRGGNVTL | 595 |
| Query: | 816 | IPVLLQIPVFQRGGSVIPIKTTVGKSTGWMTESSYGLRVALSTLQGSSVGELYLDDGHSF | 875 |
| | | \| +\|\|\| \|\|\|\|+\|\| + +\| ++ + \| \|\|\| \|++ \|\|\|\|\|\|\|\| \| | |
| Sbjct: | 596 | SAPLDKIPVHVRGGSIIPTQEP-ALTTTESRDNPFHLLVALDD-NGTASGELYLDDGESI | 653 |
| Query: | 876 | QYLHQKQFLHRKFSFCSSVLVASSPVSQGH 905 | |
| | | + +\| +\|\| ++ \| + \|+ + | |
| Sbjct: | 654 | DTQ-RGDYLLVQFSANNNTLTGTEVVTGYY 682 | |

[0308] The gene sequence of invention described herein encodes for a novel member of the glucosidase family of enzymes. Specifically, the sequence encodes a novel alpha-glucosidase2 neutral subunit-like protein. Processing glycosidases also play a role in the folding of newly formed glycoproteins and in endoplasmic reticulum quality control. Glucosidases are also useful for the treatment of diabetes. By inhibiting the glucosidase enzymes of the golgi, the requirement for insulin decreases. Therefore the novel Alpha-Glucosidase2, Alpha Neutral Subunit-like protein could be useful for the treatment of metabolic and endocrine disorders such as diabetes type I and II.

[0309] Alpha-glucosidase which active at neutral pH appears as a doublet of enzyme activity on native gel electrophoresis and was termed neutral alpha-glucosidase AB. Neutral alpha-glucosidase AB is synonymous with the glycoprotein processing enzyme glucosidase II. A mutant mouse lymphoma line which is deficient in glucosidase II is also deficient in neutral alpha-glucosidase AB, as defined electrophoretically and quantitatively (less than 0.5% of parental). In contrast, both mutant and parental cell lines exhibited several lysosomal hydrolases which are processed by glucosidase II. Both glucosidase II and neutral alpha-glucosidase AB are high-molecular mass (greater than 200,000 dalton) anionic glycoproteins which bind to concanavalin A, have a broad pH optima (5.5-8.5), and have a similar Km for maltose (4.8 versus 2.1 mM) and the artificial substrate 4-methylumbelliferyl-alpha-D-glucopyranoside (35 versus 19 microM). Similar to human neutral alpha-glucosidase AB, purified rat glucosidase II migrates as a doublet of enzyme activity on native gel electrophoresis. Although rat glucosidase II has been reported to have a subunit size of 67 kDa, pig glucosidase II has been found to have a subunit size of 100 kDa, like the 98-kDa major protein in purified human neutral alpha-glucosidase A. glucosidase II is localized to the long arm of human chromosome II.PMID: 3881423, UI: 85104919

[0310] Processing glycosidases play an important role in N-glycan biosynthesis in mammalian cells by trimming Glc(3)Man(9)GlcNAc(2) and thus providing the substrates for the formation of complex and hybrid structures by Golgi glycosyltransferases. Membrane-bound alpha-glucosidase I and soluble alpha-glucosidase II of the endoplasmic reticulum remove the alpha1,2-glucose and alpha1,3-glucose residues, respectively, beginning immediately following transfer of Glc(3)Man(9)GlcNAc(2) to nascent polypeptides. The alpha-glucosidases participate in glycoprotein folding mediated by calnexin and calreticulin by forming the monoglucosylated high mannose oligosaccharides required for the interaction with the chaperones. In some mammalian cells, Golgi endo alpha-mannosidase provides an alternative pathway for removal of glucose residues. Removal of alpha1,2-linked mannose residues begins in the endoplasmic reticulum where trimming of mannose residues in the endoplasmic reticulum has been implicated in the targeting of malfolded glycoproteins for degradation. Removal of mannose residues continues in the Golgi with the action of alpha1,2-mannosidases IA and IB that can form Man(5)GlcNAc(2) and of alpha-mannosidase II that removes the alpha1,3- and alpha1,6-linked mannose from GlcNAcMan(5)GlcNAc(2) to form GlcNAcMan(3)GlcNAc(2). These membrane-bound Golgi enzymes have been cloned and shown to have very distinct patterns of tissue-specific expression. There are also broad specificity alpha-mannosidases that can trim Man(4-9)GlcNAc(2) to Man(3)GlcNAc(2), and provide an alternative pathway toward complex oligosaccharide formation. Cloning of the remaining alpha-mannosidases will be required to evaluate their specific functions in glycoprotein maturation. PMID: 10580131, UI: 20047733

[0311] Several new pharmacological agents have recently been developed to optimize the management of type 2 (non-insulin-dependent) diabetes mellitus. There are three general therapeutic modalities relevant to diabetes care. The first modality is lifestyle adjustments aimed at improving endogenous insulin sensitivity or insulin effect. This can be achieved by increased physical activity and bodyweight reduction with diet and behavioral modification, and the use of pharmacological agents or surgery. This first modality is not discussed in depth in this article. The second modality involves increasing insulin availability by the administration of exogenous insulin, insulin analogues, sulphonylureas and the new insulin secretagogue, repaglinide. The most frequently encountered adverse effect of these agents is hypoglycaemia. Bodyweight gain can also be a concern, especially in patients who are obese. The association between hyperinsulinaemia and premature atherosclerosis is still a debatable question. The third modality consists of agents such as biguanides and thiazolidinediones which enhance insulin sensitivity, or agents that decrease insulin requirements like the alpha-glucosidase inhibitors. Type 2 diabetes mellitus is a heterogeneous disease with multiple underlying pathophysiological processes. Therapy should be individualised based on the degree of hyperglycaemia, hyperinsulinaemia or insulin deficiency. In addition, several factors have to be considered when prescribing a specific therapeutic agent. These factors include efficacy, safety, affordability and ease of administration. PMID: 10929931, UI: 20383756

[0312] The prevalence of Type 2 diabetes rises steeply with age and involves beta-cell dysfunction and diminished sensitivity to insulin. beta-cell dysfunction is important in the development of hyperglycaemia while insulin resistance seems to play a major role in the atherogenic process resulting in cardiovascular disease. Current therapeutic options include lifestyle adjustments (exercise and diet), oral hypoglycaemic agents (sulphonylureas, newer beta-cell mediated insulin releasing drugs, alpha-glucosidase inhibitors, biguanides and thiazolidinediones) and insulin treatment. Oral hypoglycaemic agents are effective only temporarily in maintaining good glycaemic control, their efficacy should be determined from changes in fasting and postprandial glucose levels. Recent studies have shown that the early initiation of insulin therapy can establish good glycaemic control. PMID: 10383606, UI: 99315525

[0313] Genetic deficiency of lysosomal acid alpha-glucosidase (acid maltase) results in the autosomal recessive disorder glycogen storage disease type II (GSDII) in which intralysosomal accumulation of glycogen primarily affects function of skeletal and cardiac muscle. This report identifies 2 of 35 GSDII patients with co-occurence of cleft lip, considerably greater than the estimated frequency of nonsyndromic cleft lip with or without cleft palate of 1 in 700 to 1,000. Because several lines of evidence support a minor cleft lip/palate (Cl/P) locus on chromosome 17q close to the locus for GSDII. Patient I (of Dutch descent) was homozygous and the parents heterozygous for an intragenic deletion of exon 18 (deltaex 18), common in Dutch patients. Patient II was heterozygous for delta525T, a mutation also common in Dutch patients and a novel nonsense mutation (172 degrees C.-->T; Gln58Stop) in exon 2, the first coding exon. The mother was heterozygous for the delta525T and the father for the 172 degrees C.-->T; Gln58Stop. The finding that both patients carried intragenic mutations eliminates a contiguous gene syndrome. Whereas the presence of cleft lip/cleft palate in a patient with GSDII could be coincidental, these co-occurences could represent a modifying action of acid alpha-glucosidase deficiency on unlinked or linked genes that result in increased susceptibility for cleft lip. PMID: 10377006, UI: 99303499

[0314] Diabetes mellitus is the most common endocrine disease, accounting for over 200 million people affected worldwide. It is characterized by a lack of insulin secretion and/or increased cellular resistance to insulin, resulting in hyperglycemia and other metabolic disturbances. People with diabetes suffer from increased morbidity and premature mortality related to cardiovascular, microvascular and neuropathic complications. The Diabetes Control and Complication Trial (DCCT) has convincingly demonstrated the relationship of hyperglycemia to the development and progression of complications and showed that improved glycemic control reduced these complications. Although the DCCT exclusively studied patients with Type 1 diabetes, there is ample evidence to support the belief that the same relationship between metabolic control and clinical outcome exists in patients with Type 2 diabetes. Therefore, a major effort should be made to develop and implement more effective treatment regimes. This article reviews those novel drugs that have been recently introduced for the management of Type 2 diabetes, or that have reached an advanced level of study and will soon be proposed for preliminary clinical trials. They include: (i) compounds that promote the synthesis/secretion of insulin by the beta-cell; (ii) inhibitors of the alpha-glucosidase activity of the small intestine; (iii) substances that enhance the action of insulin at the level of the target tissues; and (iv) inhibitors of free fatty acid oxidation. PMID: 9816470, UI: 99033258

[0315] The disclosed NOV11 nucleic acid of the invention encoding a Alpha Glucosidase 2, Alpha Neutral Subunit-like protein includes the nucleic acid whose sequence is provided in Table 11A, 11C, 11E or a fragment thereof. The invention also includes a mutant or variant nucleic acid any of whose bases may be changed from the corresponding base shown in Table 11A, 11C, or 11E while still encoding a protein that maintains its Alpha Glucosidase 2, Alpha Neutral Subunit-like activities and physiological functions, or a fragment of such a nucleic acid. The invention further includes nucleic acids whose sequences are complementary to those just described, including nucleic acid fragments that are complementary to any of the nucleic acids just described. The invention additionally includes nucleic acids or nucleic acid fragments, or complements thereto, whose structures include chemical modifications. Such modifications include, by way of nonlimiting example, modified bases, and nucleic acids whose sugar phosphate backbones are modified or derivatized. These modifications are carried out at least in part to enhance the chemical stability of the modified nucleic acid, such that they may be used, for example, as antisense binding nucleic acids in therapeutic applications in a subject. In the mutant or variant nucleic acids, and their complements, up to about 33% percent of the bases may be so changed.

[0316] The disclosed NOV11 protein of the invention includes the Alpha Glucosidase 2, Alpha Neutral Subunit-like protein whose sequence is provided in Table 11B. 11D, or 11F. The invention also includes a mutant or variant protein any of whose residues may be changed from the corresponding residue shown in Table 11B, 11D, or 11F while still encoding a protein that maintains its Alpha Glucosidase 2, Alpha Neutral Subunit-like activities and physiological functions, or a functional fragment thereof. In the mutant or variant protein, up to about 43% percent of the residues may be so changed.

[0317] The invention further encompasses antibodies and antibody fragments, such as Fab or (F_{ab})₂, that bind immunospecifically to any of the proteins of the invention.

[0318] The above defined information for this invention suggests that this Alpha Glucosidase 2, Alpha Neutral Subunit-like protein (NOV11) may function as a member of a “Alpha Glucosidase 2, Alpha Neutral Subunit family”. Therefore, the NOV11 nucleic acids and proteins identified here may be useful in potential therapeutic applications implicated in (but not limited to) various pathologies and disorders as indicated below. The potential therapeutic applications for this invention include, but are not limited to: protein therapeutic, small molecule drug target, antibody target (therapeutic, diagnostic, drug targeting/cytotoxic antibody), diagnostic and/or prognostic marker, gene therapy (gene delivery/gene ablation), research tools, tissue regeneration in vivo and in vitro of all tissues and cell types composing (but not limited to) those defined here.

[0319] The NOV11 nucleic acids and proteins of the invention are useful in potential therapeutic applications implicated in various diseases and pathologies.

[0320] NOV11 nucleic acids and polypeptides are further useful in the generation of antibodies that bind immuno-specifically to the novel NOV11 substances for use in therapeutic or diagnostic methods. These antibodies may be generated according to methods known in the art, using prediction from hydrophobicity charts, as described in the “Anti-NOVX Antibodies” section below. The disclosed NOV11 protein has multiple hydrophilic regions, each of which can be used as an immunogen. In one embodiment, a contemplated NOV11 epitope is from about amino acids 5 to 90. In another embodiment, a NOV11 epitope is from about amino acids 180 to 350. In additional embodiments, a NOV11 epitope is from about amino acids 400 to 670, from about amino acids 680 to 780, from about amino acids 860 to 900, and from about amino acids 920 to 950. These novel proteins can be used in assay systems for functional analysis of various human disorders, which will help in understanding of pathology of the disease and development of new drug targets for various disorders.

[0321] NOV12

[0322] NOV12 includes three novel Mechanical stress induced protein-like proteins disclosed below. The disclosed sequences have been named NOV12a, NOV12b, and NOV12c.

[0323] NOV12a

[0324] A disclosed NOV12 nucleic acid of 7876 nucleotides (also referred to as Curagen Accession No. CG55776-01) encoding a novel Mechanical stress induced protein-like protein is shown in Table 12A. An open reading frame was identified beginning with an ATG initiation codon at nucleotides 6-8 and ending with a TGA codon at nucleotides 7857-7859. Putative untranslated regions upstream from the initiation codon and downstream of the termination codon are underlined in Table 12A. The start and stop codons are in bold letters.

TABLE 12A
NOV12 nucleotide sequence (SEQ ID NO:45).

TCAGGATGAAGGTAAAAGGCAGAGGAATCACCTGCTTGCTGGTCTCCTTT
GCTGTGATCTGCCTGGTCGCCACCCCTGGGGGCAAGGCCTGTCCTCGCCG
CTGTGCCTGTTATATGCCTACGGAGGTACACTGCACATTTCGGTACCTGA
CTTCCATCCCAGACAGCATCCCGCCCAATGTGGAACGCATCAATTTAGGG
TACAACAGCTTGGTTAGATTGATGGAAACAGATTTTTCTGGCCTGACCAA
ACTGGAGTTACTCATGCTTCACAGCAATGGCATTCACACAATCCCTGACA
AGACCTTCTCAGATTTGCAGGCCTTGCAGGTGAGACTGATGGTCTTAAAA
ATGAGCTATAATAAAGTCCGAAAACTTCAGAAAGATACTTTTTATGGCCT
CAGGAGCTTGACACGATTGCACATGGACCACAACAATATTGAGTTTATAA
ACCCAGAGGTTTTTTATGGGCTCAACTTTCTCCGCCTGGTGCACTTGGAA
GGAAATCAGCTCACTAAGCTCCACCCAGATACATTTGTCTCTTTGAGCTA
CCTCCAGATATTTAAAATCTCTTTCATTAAGTTCCTATACTTGTCTGATA
ACTTCCTGACCTCCCTCCCTCAAGAGATGGTCTCCTATATGCCTGACCTA
GACAGCCTTTACCTGCATGGAAACCCATGGACCTGTGATTGCCATTTAAA
GTGGTTGTCTGACTGGATACAGGAGAAGCCAGGTATCTATATTGTNTTAC
CAGATGTAATAAAATGCAAAAAAGATAGAAGTCCCTCTAGTGCTCAGCAG
TGTCCACTTTGCATGAACCCTAGGACTTCTAAAGGCAAGCCGTTAGCTAT
GGTCTCAGCTGCAGCTTTCCAGTGTGCCAAGCCAACCATTGACTCATCCC
TGAAATCAAAGAGCCTGACTATTCTGGAAGACAGTAGTTCTGCTTTCATC
TCTCCCCAAGGTTTCATGGCACCCTTTGGCTCCCTCACTTTGAATATGAC
AGATCAGTCTGGAAATGAAGCTAACATGGTCTGCAGTATTCAAAAGCCCT
CAAGGACATCACCCATTGCATTCACTGAAGAAAATGACTACATCGTGCTA
AATACTTCATTTTCAACATTTTTGGTGTGCAACATAGATTACGGTCACAT
TCAGCCAGTGTGGCAAATTTTGGCTTTGTACAGTGATTCTCCTCTGATAC
TAGAAAGGAGCCACTTGCTTAGTGAAACACCGCAGCTCTATTACAAATAT
AAACAGGTGGCTCCTAAGCCTGAAGACATTTTTACCAACATAGAGGCAGA
TCTCAGAGCAGATCCCTCTTGGTTAATGCAAGACCAAATTTCCTTGCAGC
TGAACAGAACTGCCACCACATTCAGTACATTACAGATCCAGTACTCCAGT
GATGCTCAAATCACTTTACCAAGAGCAGAGATGAGGCCAGTGAAACACAA
ATGGACTATGATTTCAAGGGATAACAATACTAAGCTGGAACATACTGTCT
TGGTAGGTGGAACCGTTGGCCTGAACTGCCCAGGCCAAGGAGACCCCACC
CCACACGTGGATTGGCTTCTAGCTGATGGAAGTAAAGTGAGAGCCCCTTA
TGTCAGTGAGGATGGACGGATCCTAATAGACAAAAGTGGAAAATTGGAAC
TCCAGATGGCTGATAGTTTTGACACAGGCGTATATCACTGTATAAGCAGC
AATTATGATGATGCAGATATTCTCACCTATAGGATAACTGTGGTAGAACC
TTTGGTCGAAGCCTATCAGGAAAATGGGATTCATCACACAGTTTTCATTG
GTGAAACACTTGATCTTCCATGCCATTCTACTGGTATCCCAGATGCCTCT
ATTAGCTGGGTTATTCCAGGAAACAATGTGCTCTATCAGTCATCAAGAGA
CAAGAAAGTTCTAAACAATGGCACATTAAGAATATTACAGGTCACCCCGA
AAGACCAAGGTTATTATCGCTGTGTGGCAGCCAACCCATCAGGGGTTGAT
TTTTTGATTTTCCAAGTTTCAGTCAAGATGAAAGGACAAAGGCCCTTGGA
GCATGATGGAGAAACAGAGGGATCTGGACTTGATGAGTCCAATCCTATTG
CTCATCTTAAGGAGCCACCAGGTGCACAACTCCGTACATCTGCTCTGATG
GAGGCTGAGGTTGGAAAACACACCTCAAGCACAAGTAAGAGGCACAACTA
TCGGGAATTAACACTCCAGCGACGTGGAGATTCAACACATCGACGTTTTA
GGGAGAATAGGAGGCATTTCCCTCCCTCTGCTAGGAGAATTGACCCACAA
CATTGGGCGGCACTGTTGGAGAAAGCTAAAAAGAATGCTATGCCAGACAA
GCGAGAAAATACCACAGTGAGCCCACCCCCAGTGGTCACCCAACTCCCAA
ACATACCTGGTGAAGAAGACGATTCCTCAGGCATGCTCGCTCTACATGAG
GAATTTATGGTCCCGGCCACTAAAGCTTTGAACCTTCCAGCAAGGACAGT
GACTGCTGACTCCAGAACAATATCTGATAGTCCTATGACAAACATAAATT
ATGGCACAGAATTCTCTCCTGTTGTGAATTCACAAATACTACCACCTGAA
GAACCCACAGATTTCAAACTGTCTACTGCTATTAAAACTACAGCCATGTC
AAAGAATATAAACCCAACCATGTCAAGCCAAATACAAGGCACAACCAATC
AACATTCATCCACTGTCTTTCCACTGCTACTTGGAGCAACTGAATTTCAG
GACTCTGACCAGATGGGAAGAGGAAGAGAGCATTTCCAAAGTAGACCCCC
AATAACAGTAAGGACTATGATCAAAGATGTCAATGTCAAAATGCTTAGTA
GCACCACCAACAAACTATTATTAGAGTCAGTAAATACCACAAATAGTCAT
CAGACATCTGTAAGAGAAGTGAGTGAACCCAGGCACAATCACTTCTATTC
TCACACTACTCAAATACTTAGCACCTCCACGTTCCCTTCAGATCCACACA
CAGCTGCTCATTCTCAGTTTCCGATCCCTAGAAATAGTACAGTTAACATC
CCGCTGTTCAGACGCTTTGGGAGGCAGAGGAAAATTGGCGGAAGGGGGCG
GATTATCAGCCCATATAGAACTCCAGTTCTGCGACGGCATAGATACAGCA
TTTTCAGGTCAACAACCAGAGGTTCTTCTGAAAAAAGCACTACTGCATTC
TCAGCCACAGTGCTCAATGTGACATGTCTGTCCTGTCTTCCCAGGGAGAG
GCTCACCACTGCCACAGCAGCATTGTCTTTTCCAAGTGCTGCTCCCATCA
CCTTCCCCAAAGCTGACATTGCTAGAGTCCCATCAGAAGAGTCTACAACT
CTAGTCCAGAATCCACTATTACTACTTGAGAACAAACCCAGTGTAGAGAA
AACAACACCCACAATAAAATATTTCAGGACTGAAATTTCCCAAGTGACTC
CAACTGGTGCAGTCATGACATATGCTCCAACATCCATACCCATGGAAAAA
ACTCACAAAGTAAACGCCAGTTACCCACGTGTGTCTAGCACCAATGAAGC
TAAAAGAGATTCAGTGATTACATCGTCACTTTCAGGTGCTATCACCAAGC
CACCAATGACTATTATAGCCATTACAAGGTTTTCAAGAAGGAAAATTCCC
TGGCAACAGAACTTTGTAAATAACCATAACCCAAAAGGCAGATTAAGGAA
TCAACATAAAGTTAGTTTACAAAAAAGCACAGCTGTGATGCTTCCTAAAA
CATCTCCTGCTTTACCACAGAGACAAAGTCTCCCCTCGCACCACACTACG
ACCAAAACACACAATCCTGGAAGTCTTCCAACAAAGAAGGAGCTTCCCTT
CCCACCCCTTAACCCTATGCTTCCTAGTATTATAAGCAAAGACTCAAGTA
CAAAAAGCATCATATCAACGCAAACAGCAATACCAGCAACAACTCCTACC
TTCCCTGCATCTGTCATCACTTATGAAACCCAAACAGAGAGATCTAGAGC
ACAAACAATACAAAGAGAACAGGAGCCTCAAAAGAAGAACAGGACTGACC
CAAACATCTCTCCAGACCAGAGTTCTGGCTTCACTACACCCACTGCTATG
ACACCTCCTGTTCTAACCACAGCCGAAACTTCAGTCAAGCCCAGTGTCTC
TGCATTCACTCATTCCCCACCAGAAAACACAACTGGGATTTCAAGCACAA
TCAGTTTTCATTCAAGAACTCTTAATCTGACAGATGTGATTGAAGAACTA
GCCCAAGCAAGTACTCAGACTTTGAAGAGCACAATTGCTTCTGAAACAAC
TTTGTCCAGCAAATCACACCAGAGTACCACAACTAGGAAAGCAATCATTA
GACACTCAACCATACCACCATTCTTGAGCAGCAGTGCTACTCTAATGCCA
GTTCCCATCTCCCCTCCCTTTACTCAGAGAGCAGTTACTGACAACGTGGC
GACTCCCATTTCCGGGCTTATGACAAATACAGTGGTCAAGCTGCACGAAT
CCTCAAGGCACAATGCTAAACCACAGCAATTAGTAGCAGAGGTTGCAACA
TCCCCCAAGGTTCACCCAAATGCCAAGTTCACAATTGGAACCACTCACTT
CATCTACTCTAATCTGTTACATTCTACTCCCATGCCAGCACTAACAACAG
TTAAATCACAGAATTCTAAATTAACTCCATCTCCCTGGGCAGAAAACCAA
TTTTGGCACAAACCATACTCAGAAATTGCTGAAAAAGGCAAAAAGCCAGA
AGTAAGCATGTTGGCTACTACAGGCCTGTCCGAGGCCACCACTCTTGTTT
CAGATTGGGATGGACAGAAGAACACAAAGAAGAGTGACTTTGATAAGAAA
CCAGTTCAAGAAGCAACAACTTCCAAACTCCTTCCCTTTGACTCTTTGTC
TAGGTATATATTTGAAAAGCCCAGGATAGTTGGAGGAAAAGCTGCAAGTT
TTACTATTCCAGCTAACTCAGATGCCTTTCTTCCCTGTGAAGCTGTTGGA
AATCCCCTGCCCACCATTCATTGGACCAGAGTCCCATCAGGTATGTCAGG
ACTTGATTTATCTAAGAGGAAACAGAATAGCAGGGTCCAGGTTCTCCCCA
ATGGTACCCTGTCCATCCAGAGGGTGGAAATTCAGGACCGCGGACAGTAC
TTGTGTTCCGCATCCAATCTGTTTGGCACAGACCACCTTCATGTCACCTT
GTCTGTGGTTTCCTATCCTCCCAGGATCCTGGAGAGACGTACCAAAGAGA
TCACAGTTCATTCCGGAAGCACTGTGGAACTGAAGTGCAGAGCAGAAGGT
AGGCCAAGCCCTACAGTTACCTGGATTCTTGCAAACCAAACAGTTGTCTC
AGAATCATCCCAGGGAAGTAGGCAGGCTGTGGTGACGGTTGACGGAACAT
TGGTCCTCCACAATCTCAGTATTTATGACCGTGGCTTTTACAAATGTGTG
GCCAGCAACCCAGGTGGCCAGGATTCACTGCTGGTTAAAATACAAGTCAT
TGCAGCACCACCTGTTATTCTAGAGCAAAGGAGGCAAGTCATTGTAGGCA
CTTGGGGTGAAAGTTTAAAACTGCCCTGTACTGCAAAAGGAACTCCTCAG
CCCAGCGTTTACTGGGTCCTCTCTGATGGCACTGAAGTGAAACCATTACA
GTTTACCAATTCCAAGTTGTTCTTATTTTCAAATGGGACTTTGTATATAA
GAAACCTAGCCTCTTCAGACAGGGGCACTTATGAATGCATTGCTACCAGT
TCCACTGGTTCGGAGCGAAGAGTAGTAATGCTTACAATGGAAGAGCGAGT
GACCAGCCCCAGGATAGAAGCTGCATCCCAGAAAAGGACTGAAGTGAATT
TTGGGGACAAATTACTACTGAACTGCTCAGCCACTGGGGAGCCCAAACCC
CAAATAATGTGGAGGTTACCATCCAAGGCTGTGGTCGACCAGCAGCATAG
GGTGGGCAGCTGGATCCACGTCTACCCTAATGGATCCCTGTTTATTGGAT
CAGTAACAGAAAAAGACAGTGGTGTCTACTTGTGTGTGGCAAGAAACAAA
ATGGGGGATGATCTGATACTGATGCATGTTAGCCTAAGACTGAAACCTGC
CAAAATTGACCACAAGCAGTATTTTAGAAAGCAAGTGCTCCATGGGAAAG
ATTTCCAAGTAGATTGCAAAGCTTCCGGCTCCCCAGTGCCAGAGATATCT
TGGAGTTTGCCTGATGGAACCATGATCAACAATGCAATGCAAGCCGATGA
CAGTGGCCACAGGACTAGGAGATATACCCTTTTCAACAATGGAACTTTAT
ACTTCAACAAAGTTGGGGTAGCGGAGGAAGGAGATTATACTTGCTATGCC
CAGAACACCCTAGGGAAAGATGAAATGAAGGTCCACTTAACAGTTATAAC
AGCTGCTCCCCGGATAAGGCAGAGTAACAAAACCAACAAGAGAATCAAAG
CTGGAGACACAGCTGTCCTTGACTGTGAGGTCACTGGGGATCCCAAACCA
AAAATATTTTGGTTGCTGCCTTCCAATGACATGATTTCCTTCTCCATTGA
TAGGTACACATTTCATGCCAATGGGTCTTTGACCATCAACAAAGTGAAAC
TGCTCGATTCTGGAGAGTACGTATGTGTAGCCCGAAATCCCAGTGGGGAT
GACACCAAAATGTACAAACTGGATGTGGTCTCTAAACCTCCATTAATCAA
TGGTCTGTATACAAACAGAACTGTTATTAAAGCCACAGCTGTGAGACATT
CCAAAAAACACTTTGACTGCAGAGCTGAAGGGACACCATCTCCTGAAGTC
ATGTGGATCATGCCAGACAATATTTTCCTCACAGCCCCATACTATGGAAG
CAGAATCACAGTCCATAAAAATGGAACCTTGGAAATTAGGAATGTGAGGC
TTTCAGATTCAGCCGACTTTATCTGTGTGGCCCGAAATGAAGGTGGAGAG
AGCGTGTTGGTAGTACAGTTAGAAGTACTGGAAATGCTGAGAAGACCGAC
ATTTAGAAATCCATTTAATGAAAAAATAGTTGCCCAGCTGGGAAAGTCCA
CAGCATTGAATTGCTCTGTTGATGGTAACCCACCACCTGAAATAATCTGG
ATTTTACCAAATGGCACACGATTTTCCAATGGACCACAAAGTTATCAGTA
TCTGATAGCAAGCAATGGTTCTTTTATCATTTCTAAAACAACTCGGGAGG
ATGCAGGAAAATATCGCTGTGCAGCTAGGAATAAAGTTGGCTATATTGAG
AAATTAGTCATATTAGAAATTGGCCAGAAGCCAGTTATTCTTACCTATGC
ACCAGGGACAGTAAAAGGCATCAGTGGAGAATCTCTATCACTGCATTGTG
TGTCTGATGGAATCCCTAAGCCAAATATCAAATGGACTATGCCAAGTGGT
TATGTAGTAGACAGGCCTCAAATTAATGGGAAATACATATTGCATGACAA
TGGCACCTTAGTCATTAAAGAAGCAACAGCTTATGACAGAGGAAACTATA
TCTGTAAGGCTCAAAATAGTGTTGGTCATACACTGATTACTGTTCCAGTA
ATGATTGTAGCCTACCCTCCCCGAATTACAAATCGTCCACCCAGGAGTAT
TGTCACCAGGACAGGGGCAGCCTTTCAGCTCCACTGTGTGGCCTTGGGAG
TTCCCAAGCCAGAAATCACATGGGAGATGCCTGACCACTCCCTTCTCTCA
ACGGCAAGTAAAGAGAGGACACATGGAAGTGAGCAGCTTCACTTACAAGG
TACCCTAGTCATTCAGAATCCCCAAACCTCCGATTCTGGGATATACAAAT
GCACAGCAAAGAACCCACTTGGTAGTGATTATGCAGCAACGTATATTCAA
GTAATCTGACATGAAATAATAAAGTC

[0325] In a search of public sequence databases, the NOV12 nucleic acid sequence has 2304 of 2856 bases (80%) identical to a gb:GENBANK-ID: GENSEQ|acc:Z36321 mRNA from Rattus species (Rat mechanical stress induced cDNA encoding protein 608) (E=0.0). Public nucleotide databases include all GenBank databases and the GeneSeq patent database.

[0326] The disclosed NOV12 polypeptide (SEQ ID NO: 46) encoded by SEQ ID NO: 45 has 2617 amino acid residues and is presented in Table 12B using the one-letter amino acid code. Signal P, Psort and/or Hydropathy results predict that NOV12 has a signal peptide and is likely to be localized extracellularly with a certainty of 0.8200. In other embodiments, NOV12 may also be localized to the lysosome (lumen) with acertainty of 0.1900, the nucleus with a certainty of 0.1080, or to the endoplasmic reticulum (membrane) with a certainty of 0.1000. The most likely cleavage site for NOV12 is between positions 28 and 29: GKA-CP.

TABLE 12B
Encoded NOV12a protein sequence (SEQ ID NO:46).

MKVKGRGITCLLVSFAVICLVATPGGKACPRRCACYMPTEVHCTFRYLTS
IPDSIPPNVERINLGYNSLVRLMETDFSGLTKLELLMLHSNGIHTIPDKT
FSDLQALQVRLMVLKMSYNKVRKLQKDTFYGLRSLTRLHMDHNNIEFINP
EVFYGLNFLRLVHLEGNQLTKLHPDTFVSLSYLQIFKISFIKFLYLSDNF
LTSLPQEMVSYMPDLDSLYLHGNPWTCDCHLKWLSDWIQEKPGIYIVLPD
VIKCKKDRSPSSAQQCPLCMNPRTSKGKPLAMVSAAAFQCAKPTIDSSLK
SKSLTILEDSSSAFISPQGFMAPFGSLTLNMTDQSGNEANMVCSIQKPSR
TSPIAFTEENDYIVLNTSFSTFLVCNIDYGHIQPVWQILALYSDSPLILE
RSHLLSETPQLYYKYKQVAPKPEDIFTNIEADLRADPSWLMQDQISLQLN
RTATTFSTLQIQYSSDAQITLPRAEMRPVKHKWTMISRDNNTKLEHTVLV
GGTVGLNCPGQGDPTPHVDWLLADGSKVRAPYVSEDGRILIDKSGKLELQ
MADSFDTGVYHCISSNYDDADILTYRITVVEPLVEAYQENGIHHTVFIGE
TLDLPCHSTGIPDASISWVIPGNNVLYQSSRDKKVLNNGTLRILQVTPKD
QGYYRCVAANPSGVDFLIFQVSVKMKGQRPLEHDGETEGSGLDESNPIAH
LKEPPGAQLRTSALMEAEVGKHTSSTSKRHNYRELTLQRRGDSTHRRFRE
NRRHFPPSARRIDPQHWAALLEKAKKNAMPDKRENTTVSPPPVVTQLPNI
PGEEDDSSGMLALHEEFMVPATKALNLPARTVTADSRTISDSPMTNINYG
TEFSPVVNSQILPPEEPTDFKLSTAIKTTAMSKNINPTMSSQIQGTTNQH
SSTVFPLLLGATEFQDSDQMGRGREHFQSRPPITVRTMIKDVNVKMLSST
TNKLLLESVNTTNSHQTSVREVSEPRHNHFYSHTTQILSTSTFPSDPHTA
AHSQFPIPRNSTVNIPLFRRFGRQRKIGGRGRIISPYRTPVLRRHRYSIF
RSTTRGSSEKSTTAFSATVLNVTCLSCLPRERLTTATAALSFPSAAPITF
PKADIARVPSEESTTLVQNPLLLLENKPSVEKTTPTIKYFRTEISQVTPT
GAVMTYAPTSIPMEKTHKVNASYPRVSSTNEAKRDSVITSSLSGAITKPP
MTIIAITRFSRRKIPWQQNFVNNHNPKGRLRNQHKVSLQKSTAVMLPKTS
PALPQRQSLPSHHTTTKTHNPGSLPTKKELPFPPLNPMLPSIISKDSSTK
SIISTQTAIPATTPTFPASVITYETQTERSRAQTIQREQEPQKKNRTDPN
ISPDQSSGFTTPTAMTPPVLTTAETSVKPSVSAFTHSPPENTTGISSTIS
FHSRTLNLTDVIEELAQASTQTLKSTIASETTLSSKSHQSTTTRKAIIRH
STIPPFLSSSATLMPVPISPPFTQRAVTDNVATPISGLMTNTVVKLHESS
RHNAKPQQLVAEVATSPKVHPNAKFTIGTTHFIYSNLLHSTPMPALTTVK
SQNSKLTPSPWAENQFWHKPYSEIAEKGKKPEVSMLATTGLSEATTLVSD
WDGQKNTKKSDFDKKPVQEATTSKLLPFDSLSRYIFEKPRIVGGKAASFT
IPANSDAFLPCEAVGNPLPTIHWTRVPSGMSGLDLSKRKQNSRVQVLPNG
TLSIQRVEIQDRGQYLCSASNLFGTDHLHVTLSVVSYPPRILERRTKEIT
VHSGSTVELKCRAEGRPSPTVTWILANQTVVSESSQGSRQAVVTVDGTLV
LHNLSIYDRGFYKCVASNPGGQDSLLVKIQVIAAPPVILEQRRQVIVGTW
GESLKLPCTAKGTPQPSVYWVLSDGTEVKPLQFTNSKLFLFSNGTLYIRN
LASSDRGTYECIATSSTGSERRVVMLTMEERVTSPRIEAASQKRTEVNFG
DKLLLNCSATGEPKPQIMWRLPSKAVVDQQHRVGSWIHVYPNGSLFIGSV
TEKDSGVYLCVARNKMGDDLILMHVSLRLKPAKIDHKQYFRKQVLHGKDF
QVDCKASGSPVPEISWSLPDGTMINNAMQADDSGHRTRRYTLFNNGTLYF
NKVGVAEEGDYTCYAQNTLGKDEMKVHLTVITAAPRIRQSNKTNKRIKAG
DTAVLDCEVTGDPKPKIFWLLPSNDMISFSIDRYTFHANGSLTINKVKLL
DSGEYVCVARNPSGDDTKMYKLDVVSKPPLINGLYTNRTVIKATAVRHSK
KHFDCRAEGTPSPEVMWIMPDNIFLTAPYYGSRITVHKNGTLEIRNVRLS
DSADFICVARNEGGESVLVVQLEVLEMLRRPTFRNPFNEKIVAQLGKSTA
LNCSVDGNPPPEIIWILPNGTRFSNGPQSYQYLIASNGSFIISKTTREDA
GKYRCAARNKVGYIEKLVILEIGQKPVILTYAPGTVKGISGESLSLHCVS
DGIPKPNIKWTMPSGYVVDRPQINGKYILHDNGTLVIKEATAYDRGNYIC
KAQNSVGHTLITVPVMIVAYPPRITNRPPRSIVTRTGAAFQLHCVALGVP
KPEITWEMPDHSLLSTASKERTHGSEQLHLQGTLVIQNPQTSDSGIYKCT
AKNPLGSDYAATYIQVI

[0327] A search of sequence databases reveals that the NOV12 amino acid sequence has 1584 of 2617 amino acid residues (63%) identical to, and 1891 of 2617 amino acid residues (75%) similar to, the 2507 of 2597 amino acid residue ptnr: patp-ACC:Y53664 protein from Rattus species (Rat mechanical stress induced protein 608) (E=0.0). Public amino acid databases include the GenBank databases, SwissProt, PDB and PIR.

[0328] NOV12 is expressed in at least adrenal gland, bone marrow, brain—amygdala, brain—cerebellum, brain—hippocampus, brain—substantia nigra, brain—thalamus, brain—whole, fetal brain, fetal kidney, fetal liver, fetal lung, heart, kidney, lymphoma—Raji, mammary gland, pancreas, pituitary gland, placenta, prostate, salivary gland, skeletal muscle, small intestine, spinal cord, spleen, stomach, testis, thyroid, trachea, uterus. This information was derived by determining the tissue sources of the sequences that were included in the invention including but not limited to SeqCalling sources, Public EST sources, and/or RACE sources.

[0329] In addition, the sequence is predicted to be expressed in osteoblasts because of the expression pattern of (GENBANK-ID: Z36321) a closely related homolog in Rattus species (Rat mechanical stress induced cDNA encoding protein 608).

[0330] NOV12b

[0331] A disclosed NOV12b nucleic acid of 771 nucleotides (also referred to as Curagen Accession No. 174124289) encoding a novel Mechanical stress induced protein-like protein is shown in Table 12C. An open reading frame was identified beginning with an AAG initiation codon at nucleotides 1-3 and ending at nucleotides 769-771. The start codon is in bold letters in Table 12E. Because NOV12b has no traditional initiation or termination codons, NOV12b could be a partial reading frame extending into the 5′ and 3′ directions.

TABLE 12C
NOV12b nucleotide sequence (SEQ ID NO:47).

AAGCTTGCCTGTCCTCGCCGCTGTGCCTGTTATATGCCTACGGAGGTACA
CTGCACATTTCGGTACCTGACTTCCATCCCAGACAGCATCCCGCCCAATG
TGGAACGCATCAATTTAGGATACAACAGCTTGGTTAGATTGATGGAAACA
GATTTTTCTGGCCTGACCAAACTGGAGTTACTCATGCTTCACAGCAATGG
CATTCACACAATCCCTGACAAGACCTTCTCAGATTTGCAGGCCTTGCAGG
TCTTAAAAATGAGCTATAACAAAGTCCGAAAACTTCAGAAAGATACTTTT
TATGGCCTCAGGAGCTTGGCACGATTGCACATGGACCACAACAATATTGA
GTTTATAAACCCAGAGGTTTTTGATGGGCTCAACTTTCTCCGCCTGGTGC
ACTTGGAAGGAAATCAGCTCACTAAGCTCCACCCAGATACATTTGTCTCT
TTGAGCTACCTCCAGATATTTAAAATCTCTTTCATTAAGTTCCTATACTT
GTCTGATAACTTCCTGACCTCCCTCCCTCAAGAGATGGTCTCCTATATGC
CTGACCTAGACAGCCTTTACCTGCATGGAAACCCATGGACCTGTGATTGC
CATTTAAAGTGGTTGTCTGACTGGATACAGGAGAAGCCAGATGTAATAAA
ATGCAAAAAAGATAGAAGTCCCTCTAGTGCTCAGCAGTGTCCACTTTGCA
TGAACCCTAGGACTTCTAAAGGCAAGCCGTTAGCTATGGTCTCAGCTGCA
GCTTTCCAGTGTGCCCTCGAG

[0332] The disclosed NOV12b polypeptide (SEQ ID NO: 48) encoded by SEQ ID NO: 47 has 257 amino acid residues and is presented in Table 12D using the one-letter amino acid code.

TABLE 12D
Encoded NOV12b protein sequence (SEQ ID NO:48).

KLACPRRCACYMPTEVHCTFRYLTSIPDSIPPNVERINLGYNSLVRLMET
DFSGLTKLELLMLHSNGIHTIPDKTFSDLQALQVLKMSYNKVRKLQKDTF
YGLRSLARLHMDHNNIEFINPEVFDGLNFLRLVHLEGNQLTKLHPDTFVS
LSYLQIFKISFIKFLYLSDNFLTSLPQEMVSYMPDLDSLYLHGNPWTCDC
HLKWLSDWIQEKPDVIKCKKDRSPSSAQQCPLCMNPRTSKGKPLAMVSAA
AFQCALE

[0333] NOV12c

[0334] A disclosed NOV12c nucleic acid of 771 nucleotides (also referred to as Curagen Accession No. 174124313) encoding a novel Mechanical stress induced protein-like protein is shown in Table 12E. An open reading frame was identified beginning with an AAG initiation codon at nucleotides 1-3 and ending with nucleotides 769-771. The start codon is in bold letters in Table 12E. Because NOV12b has no traditional initiation or termination codons, NOV12c could be a partial, reading frame extending into the 5′ and 3′ directions.

TABLE 12E
NOV12c nucleotide sequence (SEQ ID NO:49).

AAGCTTGCCTGTCCTCGCCGCTGTGCCTGTTATATGCCTACGGAGGTACA
CTGCACATTTCGGTACCTGACTTCCATCCCAGACAGCATCCCGCCCAATG
TGGAACGCATCAATTTAGGATACAACAGCTTGGTTAGATTAATGGAAACA
GATTTTTCTGGCCTGACCAAACTGGAGTTACTCATGCTTCACAGCAATGG
CATTCACACAATCCCTGACAAGACCTTCTCAGATTTGCAGGCCTTGCAGG
TCTTAAAAATGAGCTATAATAAAGTCCGAAAACTTCAGAAAGATACTTTT
TATGGCCTCAGGAGCTTGACACGATTGCACATGGACCACAACAATATTGA
GTTTATAAACCCAGAGGTTTTTTATGGGCTCAACTTTCTCCGCCTGGTGC
ACTTGGAAGGAAATCAGCTCACTAAGCTCCACCCAGATACATTTGTCTCT
TTGAGCTACCTCCAGATATTTAAAATCTCTTTCATTAAGTTCCTATACTT
GTCTGATAACTTCCTGACCTCCCTCCCTCAAGAGATGGTCTCCTATATGC
CTGACCTAGACAGCCTTTACCTGCATGGAAACCCATGGACCTGTGATTGC
CATTTAAAGTGGTTGTCTGACTGGATACAGGAGAAGCCAGATGTAATAAA
ATGCAAAAAAGATAGAAGTCCCTCTAGTGCTCAGCAGTGTCCACTTTGCA
TGAACCCTAGGACTTCTAAAGGCAAGCCGTTAGCTATGGTCTCAGCTGCA
GCTTTCCAGTGTGCCCTCGAG

[0335] The disclosed NOV12c polypeptide (SEQ ID NO: 50) encoded by SEQ ID NO: 49 has 257 amino acid residues and is presented in Table 12F using the one-letter amino acid code.

TABLE 12F
Encoded NOV12c protein sequence (SEQ ID NO:50).

KLACPRRCACYMPTEVHCTFRYLTSIPDSIPPNVERINLGYNSLVRLMET
DFSGLTKLELLMLHSNGIHTIPDKTFSDLQALQVLKMSYNKVRKLQKDTF
YGLRSLTRLHMDHNNIEFINPEVFYGLNFLRLVHLEGNQLTKLHPDTFVS
LSYLQIFKISFIKFLYLSDNFLTSLPQEMVSYMPDLDSLYLHGNPWTCDC
HLKWLSDWIQEKPDVIKCKKDRSPSSAQQCPLCMNPRTSKGKPLAMVSAA
AFQCALE

[0336] NOV12d

[0337] A disclosed NOV12d nucleic acid of 771 nucleotides (also referred to as Curagen Accession No. 174124322) encoding a novel Mechanical stress induced protein-like protein is shown in Table 12G. An open reading frame was identified beginning with an AAG initiation codon at nucleotides 1-3 and ending with nucleotides 769-771. The start codon is in bold letters in Table 12G. Because NOV12d has no traditional initiation or termination codons, NOV12d could be a partial reading frame extending into the 5′ and 3′ directions.

TABLE 12G
NOV12d nucleotide sequence (SEQ ID NO:51).

AAGCTTGCCTGTCCTCGCCGCTGTGCCTGTTATATGCCTACGGAGGTACA
CTGCACATTTCGGTACCTGACTTCCATCCCAGACAGCATCCCGCCCAATG
TGGAACGCATCAATTTAGGATACAACAGCTTGGTTAGATTGATGGAAACA
GATTTTTCTGGCCTGACCAAACTGGAGTTACTCATGCTTCACAGCAATGG
CATTCACACAATCCCTGACAAGACCTTCTCAGATTTGCAGGCCTTGCAGG
TCTTAAAAATGAGCTATAACAAAGTCCGAAAACTTCAGAAAGATACTTTT
TATGGCCTCAGGAGCTTGACACGATTGCACATGGACCACAACAATATTGA
GTTTATAAACCCAGAGGTTTTTGATGGGCTCAACTTTCTCCGCCTGGTGC
ACTTGGAAGGAAATCAGCTCACTAAGCTCCACCCAGATACATTTGTCTCT
TTGAGCTACCTCCAGATATTTAAAATCTCTTTCATTAAGTTCCTATACTT
GTCTGATAACTTCCTGACCTCCCTCCCTCAAGAGATGGTCTCCTATATGC
CTGACCTAGACAGCCTTTACCTGCATGGAAACCCATGGACCTGTGATTGC
CATTTAAAGTGGTTGTCTGACTGGATACAGGAGAAGCCAGATGTAATAAA
ATGCAAAAAAGATAGAAGTCCCTCTAGTGCTCAGCAGTGTCCACTTTGCA
TGAACCCTAGGACTTCTAAAGGCAAGCCGTTAGCTATGGTCTCAGCTGCA
GCTTTCCAGTGTGCCCTCGAG

[0338] The reverse complement og NOV12d is shown in Table 12H.

TABLE 12H
NOV12d reverse complement nucleotide sequence
(SEQ ID NO:60).

CTCGAGGGCACACTGGAAAGCTGCAGCTGAGACCATAGCTAACGGCTTGC
CTTTAGAAGTCCTAGGGTTCATGCAAAGTGGACACTGCTGAGCACTAGAG
GGACTTCTATCTTTTTTGCATTTTATTACATCTGGCTTCTCCTGTATCCA
GTCAGACAACCACTTTAAATGGCAATCACAGGTCCATGGGTTTCCATGCA
GGTAAAGGCTGTCTAGGTCAGGCATATAGGAGACCATCTCTTGAGGGAGG
GAGGTCAGGAAGTTATCAGACAAGTATAGGAACTTAATGAAAGAGATTTT
AAATATCTGGAGGTAGCTCAAAGAGACAAATGTATCTGGGTGGAGCTTAG
TGAGCTGATTTCCTTCCAAGTGCACCAGGCGGAGAAAGTTGAGCCCATCA
AAAACCTCTGGGTTTATAAACTCAATATTGTTGTGGTCCATGTGCAATCG
TGTCAAGCTCCTGAGGCCATAAAAAGTATCTTTCTGAAGTTTTCGGACTT
TGTTATAGCTCATTTTTAAGACCTGCAAGGCCTGCAAATCTGAGAAGGTC
TTGTCAGGGATTGTGTGAATGCCATTGCTGTGAAGCATGAGTAACTCCAG
TTTGGTCAGGCCAGAAAAATCTGTTTCCATCAATCTAACCAAGCTGTTGT
ATCCTAAATTGATGCGTTCCACATTGGGCGGGATGCTGTCTGGGATGGAA
GTCAGGTACCGAAATGTGCAGTGTACCTCCGTAGGCATATAACAGGCACA
GCGGCGAGGACAGGCAAGCTT

[0339] The disclosed NOV12d polypeptide (SEQ ID NO: 52) encoded by SEQ ID NO: 51 has 257 amino acid residues and is presented in Table 121 using the one-letter amino acid code.

TABLE 12I
Encoded NOV12d protein sequence (SEQ ID NO:52).

KLACPRRCACYMPTEVHCTFRYLTSIPDSIPPNVERINLGYNSLVRLMET
DFSGLTKLELLMLHSNGIHTIPDKTFSDLQALQVLKMSYNKVRKLQKDTF
YGLRSLTRLHMDHNNIEFINPEVFDGLNFLRLVHLEGNQLTKLHPDTFVS
LSYLQIFKISFIKFLYLSDNFLTSLPQEMVSYMPDLDSLYLHGNPWTCDC
HLKWLSDWIQEKPDVIKCKKDRSPSSAQQCPLCMNPRTSKGKPLAMVSAA
AFQCALE

[0340] NOV12e

[0341] A disclosed NOV12e nucleic acid of 771 nucleotides (also referred to as Curagen Accession No. 174124322) encoding a novel Mechanical stress induced protein-like protein is shown in Table 12J. An open reading frame was identified beginning with an AAG initiation codon at nucleotides 1-3 and ending with nucleotides 769-771. The start codon is in bold letters in Table 12J. Because NOV12e has no traditional initiation or termination codons, NOV12e could be a partial reading frame extending into the 5′ and 3′ directions.

TABLE 12J

| | |
|---|---|
| NOV12e nucleotide sequence. | (SEQ ID NO:53) |

AAGCTTGCCTGTCCTCGCCGCTGTGCCTGTTATATGCCTACGGAGGTACACTGCACATTTCCGTACCTGACT
TCCATCCCAGACAGCATCCCGCCCAATGTGGAACGCATCAATTTAGGATACAACAGCTTGGTTAGATTGATG
GAAACAGATTTTTCTGGCCTGACCAAACTGGAGTTACTCATGCTTCACAGCAATGGCATTCACACAATCCCT
GGCAAGACCTTCTCAGATTTGCAGGCCTTGCAGGTCTTAAAAATGAGCTATAACAAAGTCCGAAAACTTCAG
AAAGATACTTTTTATGGCCTCAGGAGCTTGACACGATTGCACATGGACCACAACAATATTGAGTTTATAAAC
CCAGAGGTTTTTGATGGGCTCAACTTTCTCCGCCTGGTGCACTTGGAAGGAAATCAGCTCACTAAGCTCCAC
CCAGATACATTTGTCTCTTTGAGCTACCTCCAGATATTTAAAATCTCTTTCATTAAGTTCCTATACTTGTCT
GATAACTTCCTGACCTCCCTCCCTCAAGAGATGGTCTCCTATATGCCTGACCTAGACAGCCTTTACCTGCAT
GGAAACCCATGGACCTGTGATTGCCATTTAAAGTGGTTGTCTGACTGGATACAGGAGAAGCCAGATGTAATA
AAATGCAAAAAAGATAGAAGTCCCTCTAGTGCTCAGCAGTGTCCACTTTGCATGAACCCTAGGACTTCTAAA
GGCAAGCCGTTAGCTATGGTCTCAGCTGCAGCTTTCCAGTGTGCCCTCGAG

[0342] The disclosed NOV12e polypeptide (SEQ ID NO: 54) encoded by SEQ ID NO: 53 has 257 amino acid residues and is presented in Table 12K using the one-letter amino acid code.

TABLE 12K

| | |
|---|---|
| Encoded NOV12e protein sequence. | (SEQ m NO:54) |

KLACPRRCACYMPTEVHCTFRYLTSIPDSIPPNVERINLGYNSLVRLMETDFSGLTKLELLMLHSNGIHTIP
GKTFSDLQALQVLKMSYNKVRKLQKDTFYGLRSLTRLHMDHNNIEFINPEVFDGLNFLRLVHLEGNQLTKLH
PDTFVSLSYLQIFKISFIKFLYLSDNFLTSLPQEMVSYMPDLDSLYLHGNPWTCDCHLKWLSDWIQEKPDVI
KCKKDRSPSSAQQCPLCMNPRTSKGKPLANVSAAAFQCALE

[0343] NOV12f

[0344] A disclosed NOV12f nucleic acid of 8270 nucleotides (also referred to as Curagen Accession No. CG55776-03) encoding a novel Mechanical stress induced protein-like protein is shown in Table 12L. An open reading frame was identified beginning with an ATG initiation codon at nucleotides 6-8 and ending with a TGA codon at nucleotides 7779-7781. Putative untranslated regions upstream from the initiation codon and downstream of the termination codon are underlined in Table 12L. The start and stop codons are in bold letters.

TABLE 12L

| | |
|---|---|
| NOV12 nucleotide sequence. | (SEQ ID NO:55) |

TCAGGATGAAGGTAAAAGGCAGAGGAATCACCTGCTTGCTGGTCTCCTTTGCTGTGATCTGCCTGGTCGCCA
CCCCTGCGGGCAAGGCCTGTCCTCGCCGCTGTGCCTGTTATATGCCTACGGAGGTACACTGCACATTTCGGT
ACCTGACTTCCATCCCAGACAGCATCCCGCCCAATGTGGAACGCATCAATTTAGGGTACAACAGCTTGGTTA
GATTGATGGAAACAGATTTTTCTGGCCTGACCAAACTGGAGTTACTCATGCTTCACAGCAATGGCATTCACA
CAATCCCTGACAAGACCTTCTCAGATTTGCAGGCCTTGCAGGTGAGACTGATGGTCTTAAAAATGAGCTATA
ATAAAGTCCGAAAACTTCAGAAAGATACTTTTTATGGCCTCAGGAGCTTTACACGATTGCACATGGACCACA
ACAATATTGAGTTTATAAACCCAGAGGTTTTTTATGGGCTCAACTTTCTCCGCCTGGTGCACTTGGAAGGAA
ATCACCTCACTAAGCTCCACCCAGATACATTTGTCTCTTTGAGCTACCTCCAGATATTTAAAATCTCTTTCA
TTAAGTTCCTATACTTGTCTGATAACTTCCTGACCTCCCTCCCTCAAGAGATGGTCTCCTATATGCCTGACC
TAGACAGCCTTTACCTGCATGGAAACCCATGGACCTGTGATTGCCATTTAAAGTGGTTGTCTGACTGGATAC
AGGAGAAGCCAGGTATCTATATTGTNTTACCAGATGTAATAAAATGCAAAAAAGATAGAAGTCCCTCTAGTG
CTCAGCAGTGTCCACTTTGCATGAACCCTAGGACTTCTAAAGGCAAGCCGTTACCTATGGTCTCAGCTGCAG
CTTTCCAGTGTGCCAAGCCAACCATTGACTCATCCCTGAAATCAAAGAGCCTGACTATTCTGGAAGACAGTA
GTTCTGCTTTCATCTCTCCCCAACGTTTCATGGCACCCTTTGGCTCCCTCACTTTOAATATGACAGATCAGT
CTGGAAATGAAGCTAACATGGTCTGCAGTATTCAAAAGCCCTCAAGGACATCACCCATTGCATTCACTGAAG
AAAATGACTACATCGTGCTAAATACTTCATTTTCAACATTTTTCGTGTGCAACATAGATTACGGTCACATTC
AGCCAGTGTGGCAAATTTTGGCTTTGTACAGTGATTCTCCTCTGATACTAGAAAGGACCCACTTGCTTAGTG
AAACACCGCAGCTCTATTACAAATATAAACAGGTGGCTCCTAAGCCTGAAGACATTTTTACCAACATAGAGG
CAGATCTCAGAGCAGATCCCTCTTGGTTAATGCAAGACCAAATTTCCTTGCAGCTGAACAGAACTGCCACCA
CATTCACTACATTACAGATCCAGTACTCCAGTGATGCTCAAATCACTTTACCAAGAGCAGAGATGAGGCCAG
TGAAACACAAATGGACTATGATTTCAAGGGATAACAATACTAAGCTGGAACATACTGTCTTGGTAGGTGGAA
CCGTTGGCCTGAACTGCCCAGGCCAAGGAGACCCCACCCCACACGTGGATTGGCTTCTAGCTGATGGAAGTA
AAGTGAGAGCCCCTTATGTCAGTGAGGATGGACCGATCCTAATAGACAAAAGTGGAAAATTGGAACTCCAGA
TGGCTGATAGTTTTGACACAGGCGTATATCACTGTATAAGCAGCAATTATGATGATGCAGATATTCTCACCT
ATAGGATAACTCTGGTAGAACCTTTGGTCGAAGCCTATCAGGAAAATGGGATTCATCACACAGTTTTCATTG
GTGAAACACTTGATCTTCCATGCCATTCTACTGGTATCCCAGATGCCTCTATTAGCTGGGTTATTCCAGGAA
ACAATGTGCTCTATCAGTCATCAAGAGACAAGAAAGTTCTAAACAATGGCACATTAAGAATATTACAGGTCA
CCCCGAAAGACCAAGGTTATTATCGCTGTGTGGCAGCCAACCCATCAGGGGTTGATTTTTTGATTTTCCAAG
TTTCAGTCAAGATGAAAGGACAAAGGCCCTTGGAGCATGATGOAGAAACAGAGGGATCTGGACTTGATGAGT
CCAATCCTATTGCTCATCTTAAGGAGCCACCAGGTCCACAACTCCGTACATCTGCTCTGATGGAGGCTGAGG
TTGGAAAACACACCTCAAGCACAAGTAAGAGGCACAACTATCGGGAATTAACACTCCAGCGACGTGGAGATT
CAACACATCGACGTTTTAGCGAGAATAOGAGGCATTTCCCTCCCTCTGCTAGGAGAATTGACCCACAACATT
GGGCOGCACTGTTGGAGAAAGCTAAAAAGAATGCTATGCCAGACAAGCGAGAAAATACCACAGTGAGCCCAC
CCCCAGTGGTCACCCAACTCCCAAACATACCTGGTGAAGAAGACGATTCCTCAGGCATGCTCGCTCTACATG
AGGAATTTATGGTCCCGGCCACTAAAGCTTTGAACCTTCCAGCAAGGACAGTGACTGCTGACTCCAGAACAA
TATCTGATAGTCCTATGACAAACATAAATTATGGCACAGAATTCTCTCCTGTTGTGAATTCACAAATACTAC
CACCTGAAGAACCCACAGATTTCAAACTGTCTACTGCTATTAAAACTACAGCCATGTCAAAGAATATAAACC
CAACCATGTCAAGCCAAATACAAGOCACAACCAATCAACATTCATCCACTGTCTTTCCACTGCTACTTGGAG
CAACTGAATTTCAGGACTCTGACCAGATGGGAAGAGGAAGAGAGCATTTCCAAAGTAGACCCCCAATAACAG
TAAGGACTATGATCAAAGATGTCAATGTCAAAATGCTTAGTAGCACCACCAACAAACTATTATTAGAGTCAG
TAAATACCACAAATAGTCATCAGACATCTGTAAGAGAAGTGAGTGAACCCACGCACAATCACTTCTATTCTC
ACACThCTCAAATACTTAGCACCTCCACGTTCCCTTCAGATCCACACACAGCTGCTCATTCTCAGTTTCCGA
TCCCTAGAAATAGTACAGTTAACATCCCGCTGTTCAGACGCTTTGGGAGGCAGACGAAAATTGGCGGAACGG
GGCGGATTATCAGCCCATATAGAACTCCAGTTCTGCGACGGCATAGATACAGCATTTTCAGGTCAACAACCA
GACGTTCTTCTGAAAAAAGCACTACTGCATTCTCAGCCACAGTGCTCAATGTGACATGTCTGTCCTGTCTTC
CCACGGAGACGCTCACCACTGCCACAGCAGCATTGTCTTTTCCAAGTGCTGCTCCCATCACCTTCCCCAAAG
CTGACATTGCTAGAGTCCCATCAGAAGAGTCTACAACTCTAGTCCAGAATCCACTATTACTACTTGAGAACA
AACCCAGTGTAGAGAAAACAACACCCACAATAAAATATTTCAGGACTGAAATTTCCCAAGTGACTCCAACTG
GTGCAGTCATGACATATGCTCCAACATCCATACCCATGGAAAAAACTCACAAAGTAAACCCCAGTTACCCAC
GTGTGTCTAGCACCAATGAAGCTAAAAGAGATTCAGTGATTACATCGTCACTTTCAGGTGCTATCACCAAGC
CACCAATGACTATTATAGCCATTACAAGGTTTTCAAGAAGGAAAATTCCCTGGCAACAGAACTTTGTAAATA
ACCATAACCCAAAAGGCAGATTAAGGAATCAACATAAAGTTAGTTTACAAAAAAGCACAGCTGTGATGCTTC
CTAAAACATCTCCTGCTTTACCACAGAGACAAAGTCTCCCCTCGCACCACACTACGACCAAAACACACAATC
CTGGAAGTCTTCCAACAAAGAAGGAGCTTCCCTTCCCACCCCTTAACCCTATGCTTCCTAGTATTATAAGCA
AAGACTCAAGTACAAAAAGCATCATATCAACGCAAACAGCAATACCAGCAACAACTCCTACCTTCCCTGCAT
CTGTCATCACTTATGAAACCCAAACAGAGAGATCTAGAGCACAAACAATACAAAGAGAACACGAGCCTCAAA
AGAAGAACAGGACTGACCCAAACATCTCTCCAGACCAGAGTTCTGGCTTCACTACACCCACTGCTATGACAC
CTCCTGTTCTAACCACAGCCGAAACTTCAGTCAAGCCCAGTGTCTCTGCATTCACTCATTCCCCACCAGAAA
ACACAACTGGGATTTCAAGCACAATCAGTTTTCATTCAAGAACTCTTAATCTGACAGATGTGATTGAAGAAC
TAGCCCAAGCAAGTACTCAGACTTTGAAGAGCACAATTGCTTCTGAAACAACTTTGTCCAGCAAATCACACC
AGAGTACCACAACTAGGAAAGCAATCATTAGACACTCAACCATACCACCATTCTTGAGCAGCAGTCCTACTC
TAATGCCAGTTCCCATCTCCCCTCCCTTTACTCAGAGAGCAGTTACTGACAACGTOGCGACTCCCATTTCCG
CGCTTATGACAAATACAGTGGTCAAGCTCCACGAATCCTCAACGCACAATGCTAAACCACAGCAATTAGTAG
CAGAGGTTGCAACATCCCCCAAGGTTCACCCAAATGCCAAGTTCACAATTGGAACCACTCACTTCATCTACT
CTAATCTGTTACATTCTACTCCCATCCCAGCACTAACAACAGTTAAATCACAGAATTCTAAATTAACTCCAT
CTCCCTGGGCAGAAAACCAATTTTGGCACAAACCATACTCAGAAATTGCTGAAAAAGGCAAAAAGCCAGAAG
TAAGCATGTTGGCTACTACAGGCCTGTCCGAGGCCACCACTCTTGTTTCAGATTGGGATGGACAGAAGAACA
CAAAGAAGAGTGACTTTGATAAGAAACCAGTTCAAGAAGCAACAACTTCCAAACTCCTTCCCTTTGACTCTT
TGTCTAGGTATATATTTGAAAAGCCCAGGATAGTTGGAGGAAAAGCTGCAAGTTTTACTATTCCAGCTAACT
CAGATGCCTTTCTTCCCTGTGAAGCTGTTGGAAATCCCCTGCCCACCATTCATTGGACCAGAGTCCCATCAG
GTATGTCAGGACTTGATTTATCTAAGAGGAAACAGAATAGCAGGGTCCAGGTTCTCCCCAATGGTACCCTGT
CCATCCAGAGGGTGGAAATTCAGGACCGCGGACAGTACTTGTGTTCCGCATCCAATCTGTTTGGCACAGACC
ACCTTCATGTCACCTTGTCTGTGGTTTCCTATCCTCCCAGGATCCTGGAGAGACGTACCAAAGAGATCACAG
TTCATTCCGGAAGCACTGTGGAACTGAAGTGCAGAGCAGAAGGTAGGCCAAGCCCTACAGTTACCTGGATTC
TTGCAAACCAAACAGTTGTCTCAGAATCATCCCAGGGAAGTAGGCAGGCTGTGGTGACGGTTGACGGAACAT
TGGTCCTCCACAATCTCAGTATTTATGACCGTGGCTTTTACAAATGTGTGGCCAGCAACCCAGGTGGCCAGG
ATTCACTGCTGGTTAAAATACAACTCATTGCAGCACCACCTGTTATTCTAGAGCAAAGGAGGCAAGTCATTG
TAGGCACTTGGGGTGAAAGTTTAAAACTGCCCTGTACTGCAAAAGGAACTCCTCAGCCCAGCGTTTACTGGG
TCCTCTCTGATGGCACTGAAGTGAAACCATTACAGTTTACCAATTCCAAGTTGTTCTTATTTTCAAATGGGA
CTTTGTATATAAGAAACCTAGCCTCTTCAGACAGGGGCACTTATGAATGCATTGCTACCAGTTCCACTGGTT
CGGAGCGAAGAGTAGTAATGCTTACAATGGAAGAGCGAGTGACCAGCCCCAGGATAGAAGCTGCATCCCAGA
AAAGGACTGAAGTGAATTTTGGGGACAAATTACTACTGAACTGCTCAGCCACTGGGGAGCCCAAACCCCAAA
TAATGTGGAGGTTACCATCCAAGGCTGTGGTCGACCAGCAGCATAGAGTGGGCACGTGGATCCACGTCTACC
CTAATGGATCCCTGTTTATTGGATCAGTAACAGAAAAAGACAGTGGTGTCTACTTGTGTGTGGCAAGAAACA
AAATGGGGGATGATCTGATACTGATGCATGTTAGCCTAGAACTGAAACCTGCCAAAATTGACCACAAGCAGT
ATTTTAGAAAGCAAGTGCTCCATGGGAAAGATTTCCAAGTAGATTGCAAAGCTTCCGGCTCCCCAGTGCCAG
AGATATCTTGGAGTTTGCCTGATGGAACCATGATCAACAATGCAATGCAAGCCGATGACAGTGGCCACAGGA
CTAGGAGATATACCCTTTTCAACAATGGAACTTTATACTTCAACAAAGTTGGGGTAGCGGAGGAAGGAGATT
ATACTTGCTATGCCCAGAACACCCTAGGGAAAGATGAAATGAAGGTCCACTTAACAGTTATAACAGCTGCTC
CCCGGATAAGGCAGAGTAACAAAACCAACAAGAGAATCAAAGCTGGAGACACAGCTGTCCTTGACTGTGAGG
TCATTCATGCCAATGGGTCTTTGACCATCAACAAAGTGAAACTGCTCGATTCTGGAGAGTACGTATGTGTAG
CCCGAATCCCAGTGGGGATGACACCAAAATGTACAAACTGGATGTGGTCTCTAAACCTCCATTAATCAAATG
GTCTGTATACAAATAGAACTGTTATTAAAGCCACAGCTGTGAGACATTCCAAAAAACACTTTGACTGCAGAG
CTGAAGGGACACCATCTCCTGAAGTCATGTGGATCATGCCAGACAATATTTTCCTCACAGCCCCATACTATG
GAAGCAGAATCACAGTCCATAAAAATGGAACCTTGGAAATTAGGAATGTGAGGCTTTCAGATTCAGCCGACT
TTATCTGTGTGGCCCGAAATGAAGGTGGAGAGAGCGTGTTGGTAGTACAGTTAGAAGTACTGGAAATGCTGA
GAAGACCGACATTTAGAAATCCATTTAATGAAAAAATAGTTGCCCAGCTGGGAAAGTCCACAGCATTGAATT
GCTCTGTTGATGGTAACCCACCACCTGAAATAATCTGGATTTTACCAAATGGCACACGATTTTCCAATGGAC
CACAAAGTTATCAGTATCTGATAGCAAGCAATCGTTCTTTTATCATTTCTAAAACAACTCGGGAGGATGCAG
GAAAATATCGCTGTGCAGCTAGGAATAAAGTTGGCTATATTGAGAAATTAGTCATATTAGAAATTGGCCAGA
AGCCAGTTATTCTTACCTATGCACCAGGGACAGTAAAAGGCATCAGTGGAGAATCTCTATCACTGCATTGTG
TGTCTGATGGAATCCCTAAGCCAAATATCAAATGGACTATGCCAAGTGGTTATGTAGTAGACAGGCCTCAAA
TTAATGGGAAATACATATTGCATGACAATGGCACCTTAGTCATTAAAGAAGCAACAGCTTATGACAGAGGAA
ACTATATCTGTAAGGCTCAAAATAGTGTTGGTCATACACTGATTACTGTTCCAGTAATGATTGTAGCCTACC
CTCCCCGAATAACAAATCGTCCACCCAGGAGTATTGTCACCAGGACAGGGGCAGCCTTTCAGCTCCACTGTG
TGGCCTTGGGAGTTCCCAAGCCAGAAATCACGTGGGAGATGCCTGACCACTCCCTTCTCTCAACGGCAAGTA
AAGAGAGGACACATGGAAGTGAGCAGCTTCACTTACAAGGTACCCTAGTCATTCAGAATCCCCAAACCTCCG
ATTCTGGGATATACAAATGCACAGCAAAGAACCCACTTGGTAGTGATTATGCAGCAACGTATATTCAAGTAA
TCTGACATGAAATAATAAAGTCAACAACATCTGGGCAGAATTTATTTTTTGGAAGAAGTTTAATCAAAGGCA
GCCATAGGCATGTAAATGAATTTGAATACATTTACAGTATTAAATTTACAATGAACATGCAAAATAAAAGGA
CTTGTAAATAAATGCATTATGAACTGATGATACTGATTTATTTAATGGATCTCAAAACAAACTTTTAACTTA
AGGCACTTTTATTTTGCCAACAAATAACAATAAACAAACATTGAAACGGTTCACTATAAAATAACAAATGGC
TAATGTACCTGAATTTTTCAGTAAAAAAATGAACTTCTAATACCAGTTGCCTAGTGTCCACCTCCTATCAAT
GTTACAAGCATGGCACTCAGAACAGAGACAATGGAAAATATTAAATCTGCAATCTTTATGATGTAAATTTAC
CATCCTGATGTATAAATATTTTGTGGTTTATAAATTTTTTTGCTAAAACCTAAAAAAA

[0345] In a search of public sequence databases, the NOV12f nucleic acid sequence has 879 of 1446 bases (60%) identical to a gb:GENBANK-ID:AF245505|acc:AF245505.1 mRNA from Homo sapiens (Homo sapiens adlican mRNA, complete cds) (E=2.3e⁻¹²⁷). Public nucleotide databases include all GenBank databases and the GeneSeq patent database.

[0346] The disclosed NOV12f polypeptide (SEQ ID NO: 56) encoded by SEQ ID NO: 55 has 2591 amino acid residues and is presented in Table 12M using the one-letter amino acid code. Signal P, Psort and/or Hydropathy results predict that NOV12 has a signal peptide and is likely to be localized extracellularly with a certainty of 0.8200. In other embodiments, NOV12 may also be localized to the lysosome (lumen) with acertainty of 0.1900, the nucleus with a certainty of 0.1080, or to the endoplasmic reticulum (membrane) with a certainty of 0.1000. The most likely cleavage site for NOV12 is between positions 28 and 29: GKA-CP.

TABLE 12M

| | |
|---|---|
| Encoded NOV12f protein sequence. | (SEQ ID NO:56) |

MKVKGRGITCLLVSFAVICLVATPGGKACPRRCACYMPTEVHCTFRYLTSIPDSIPPNVERINLGYNSLVRL
METDFSGLTKLELLMLHSNGIHTIPDKTFSDLQALQVRLMVLKMSYNKVRKLQKDTFYGLRSLTRLHMDHNN
IEFINPEVFYGLNFLRLVHVLEGNQLTKLHPDTFVSLSYLQIFKISFIKFLYSDNFLTSLPQEMVSTMPDLD
SLYLHGNPWTCKCHLKWLSDWIQEKPGIYIVLPDVIKCKKDRSPSSAQQCPLCMNPRTSKGKPLAMVSAAAF
QCAKPTIDSSLKSKSLTILEDSSSAFISPQGFMAPFGSLTLNMTDQSGNEANMVCSIQKPSRTSPAIFTEEN
DYIVLNTSFSTFLVCNIDYGHIQPVWQILALYSDSPLILERSHLLSETPQLYYKYKQVAPKPEDIFTNIEAD
LRADPSWLMQDQISLQLNRTATTFSTLQIQYSSDAQITLPRAEMRPVKHKWTMISRDNNTKLEHTVLVGGTV
GLNCPGQGDPTPHVDWLLADGSKVRAPYVSEDGRILIDKSGKLELQMADSFDTGVYHCISSNYDDADILTYR
ITVVEPLVEAYQENGIHHTVFIGETLDLPCHSTGIPDASISWVIPGNNVLYQSSRDKKVLNNGTLRILQVTP
KDQGYYRCVAANPSGVDFLIFQVSVKMKGQRPLEHDGETEGSGLDESNPIAHLKEPPGAQLRTSALMEAEVG
KHTSSTSKRHNYRELTLQRRGDSTHRRFRENRRHFPPSARRIDPQHWAALLEKAKKNAMPDKRENTTVSPPP
VVTQLPNIPGEEDDSSGMLALHEEFMVPATKALNLPARTVTADSRTISDSPMTNINYGTEFSPVVNSQILPP
EEPTDFKLSTAIKTTAMSKNINPTMSSQIQGTTNQHSSTVFPLLLGATEFQDSDQMGRGREHFQSRPPITVR
TMIKDVNVKMLSSTTNKLLLESVNTTNSHQTSVREVSEPRHNHFYSHTTQILSTSTFPSDPHTAAHSQFPIP
RNSTVNIPLFRRFGRQRKIGGRGRIISPYRTPVLRRHRYSIFRSTTRGSSEKSTTAFSATVLNVTCLSCLPR
ERLTTATAALSFPSAAPITFPKADIARVPSEESTTLVQNPLLLLENKPSVEKTTPTIKYFRTEISQVTPTGA
VMTYAPTSIPMEKTHRVNASYPRVSSTNEAXRDSVITSSLSGAITKPPMTIIAITRFSRRKIPWQQNFVNNH
NPKGRLRNQHKVSLQKSTAVMLPKTSPALPQRQSLPSHHTTTKTHNPGSLPTKKELPFPPLNPMLPSIISKD
SSTKSIISTQTAIPATTPTFPASVITYETQTERSRAOTIQREQEPQKKNRTDPMISPDQSSGFTTPTAMTPP
VLTTAETSVKPSVSAFTHSPPENTTGISSTISFHSRTLNLTDVIEELAQASTQTLKSTIASETTLSSKSHQS
TTTRKAIIRHSTIPPFLSSSATLMPVPTSPPFTQRAVTDNVATPISGLMTNTVVKLHESSRHNAKPQQLVAE
VATSPKVHPNAKFTIGTTHFIYSNLLHSTPMPALTTVKSQNSKLTPSPWAENQFWHKPYSEIAEKGKKPEVS
MLATTGLSEATTLVSDWDGQKNTKKSDFDKKPVQEATTSKLLPFDSLSRYIFEKPRIVGGKAASFTIPANSD
AFLPCEAVGNPLPTIHWTRVPSGMSGLDLSKRKQNSRVOThPNGTLSIQRVEIQDRGQYLCSASNLFGTDHL
HVTLSVVSYPPRILERRTKEITVMSGSTVELKCRAEGRPSPTVTWILANQTVVSESSQGSRQAVVTVDGTLV
LHNLSIYDRGFYKCVASNPGGQDSLLVKIQVIAAPPVILEQRRQVIVGTWGESLKLPCTAKGTPQPSVYWVL
SDGTEVKPLQFTNSKLFLFSNGTLYIRNLASSDRGTYECIATSSTGSERRVVMLTMEERVTSPRIEAASQKR
TEVNFGDKLLLNCSATGEPKPQIMWRLPSKAVVDQQHRVGSWIHVYPNCSLFIGSVTEKDSGVYLCVARNKM
GDDLILMHVSLELKPAKIDHKQYFRKQVLHGKDFQVDCKASGSPVPEISWSLPDGTMINNAMQADDSGHRTR
RYTLFNNGTLYFNKVGVAEEGDYTCYAQNTLGKDEMKVHLTVITAAPRIRQSNKTNKRIKAGDTAVLDCEVI
HANGSLTINKVKLLDSGEYVCVARNPSGDDTKNYKLDVVSKPPLINGLYTNRTVIKATAVRHSKKHFDCRAE
GTPSPEVMWIMPDNIFLTAPYYGSRITVHKNGTLEIRNVRLSDSADFICVARNEGGESVLVVQLEVLEMLRR
PTFRNPFNEKIVAQLGKSTALNCSVDGNPPPEIIWILPNGTRFSNGPQSYQYLIASNGSFIISKTTREDAGK
YRCAARNKVGYIEKLVILEIGQKPVILTYAPGTVKGISGESLSLHCVSDGIPKPNIKWTMPSGYVVDRPQIN
GKYILHDNGTLVIKEATAYDRGNYICKAQNSVGHTLITVPVMIVAYPPRITNRPPRSIVTRTGAAFQLHCVA
LGVPKPEITWEMPDHSLLSTASKERTHGSEQLHLQGTLVIQNPQTSDSGIYKCTAKNPLGSDYAATYIQVI

[0347] A search of sequence databases reveals that the NOV12f amino acid sequence has 246 of 522 amino acid residues (47%) identical to, and 348 of 522 amino acid residues (66%) similar to, the 2828 amino acid residue ptnr:SPTREMBL-ACC:Q9NR99 protein from Homo sapiens (Human) (Adlican) (E=0.0). Public amino acid databases include the GenBank databases, SwissProt, PDB and PIR.

[0348] NOV12f is expressed in at least the following tissues: mammalian tissue, parotid salivary glands, liver, small intestine, peripheral blood, pituitary gland, mammary gland/breast, testis, lung, lung pleura, skin, heart, tonsil, brain, uterus, cochlea. Expression information was derived from the tissue sources of the sequences that were included in the derivation of the sequence of NOV12f.

[0349] The disclosed NOV12a polypeptide has homology to the amino acid sequences shown in the BLASTP data listed in Table 12N.

TABLE 12N
BLAST results for NOV12a

| Gene Index/ | | Length | Identity | Positives | |
|---|---|---|---|---|---|
| Identifier | Protein/Organism | (aa) | (%) | (%) | Expect |
| gi\|9280405\|gb\| | adlican | 2828 | 440/980 | 626/980 | 0.0 |
| AAF86402.1\| | [Homo sapiens] | | (44%) | (62%) | |
| AF245505_1 | | | | | |
| (AF245505) | | | | | |
| gi\|17444262\|ref\|XP_{—} | hemicentrin [Homo sapiens] | 3645 | 259/880 | 390/880 | 1e−84 |
| 053531.2\| | | | (29%) | (43%) | |
| (XM_053531) | | | | | |
| gi\|14575679\|gb\| | hemicentin | 5636 | 259/880 | 390/880 | 1e−84 |
| AAK68690.1\| | [Homo sapiens] | | (29% | (43%) | |
| AF156100_1 | | | | | |
| (AF156100) | | | | | |

[0350] The homology between these and other sequences is shown graphically in the ClustalW analysis shown in Table 12O. In the ClustalW alignment of the NOV12 protein, as well as all other ClustalW analyses herein, the black outlined amino acid residues indicate regions of conserved sequence (i.e., regions that may be required to preserve structural or functional properties), whereas non-highlighted amino acid residues are less conserved and can potentially be altered to a much broader extent without altering protein structure or function.

[image]

[image]

[image]

[image]

[image]

[image]

[image]

[image]

[image]

[image]

[image]

[image]

[image]

[image]

[image]

[image]

[image]

[image]

[0351] Tables 12P-12V lists the domain description from DOMAIN analysis results against NOV12. This indicates that the NOV12 sequence has properties similar to those of other proteins known to contain this domain. Domain analysis for NOV12 revealed numerous alignments of four different domains. Representations of each domain are disclosed herein.

TABLE 12P

Domain Analysis of NOV12

gnL|Smart|smart00409, 1G, Immunoglobulin (SEQ ID NO:129)
CD-Length=86 residues, 91.9% aligned
Score=65.9 bits (159), Expect=3e−11

| | | | |
|---|---|---|---|
| Query: | 2148 | KAGDTAVLDCEVTGDPKPKIFWLLPSNDMISFSIDRYTFHANG---SLTINKVKLLDSGE | 2204 |
| | | \| \|++ \| \|\| +\|+\| \| + \| +++ \| \|++ +\| +\|\|\|+ \| \|\|\| | |
| Sbjct: | 7 | KEGESVTLSCEASGNPPPTVTWYKQGGKLLAES-GRFSVSRSGGNSTLTISNVTPEDSGT | 65 |
| Query: | 2205 | YVCVARNPSGDDTKMYKLDV 2224 | |
| | | \| \| \| \| \|\| + \| \| | |
| Sbjct: | 66 | YTCAATNSSGSASSGTTLTV 85 | |

[0352] TABLE 12Q

Domain Analysis of NOV12

gnl|Smart|smart00409, 1G. Immunoglobulin (SEQ ID NO:129)
CD-Length=86 residues, 95.3% aligned
Score=65.5 bits (158), Expect=4e−11

| | | | |
|---|---|---|---|
| Query: | 595 | TVFIGETLDLPCHSTGIPDASISWVIPGNNVLYQSSRDK--KVLNNGTLRILQVTPKDQG | 652 |
| | | \|\| \|\|++ \| \| ++\| \| +++\| \| +\| +\| \| + \| \|\| \| \|\|\|+\| \| | |
| Sbjct: | 5 | TVKEGESVTLSCEASGNPPPTVTWYKQGGKLLAESGRFSVSRSGGNSTLTISNVTPEDSG | 64 |
| Query: | 653 | YYRCVAANPSGVDFLIFQVSVK 674 | |
| | | \| \| \| \| \|\| ++\| | |
| Sbjct: | 65 | TYTCAATNSSGSASSGTTLTVL 86 | |

[0353] TABLE 12R

Domain Analysis of NOV12

gnl|Smart|smart00408, IGc2, Immunoglobulin C-2 Type (SEQ ID NO:130)
CD-Length 63 residues, 96.8% aligned
Score=60.8 bits (146). Expect=9e−10

| | | | |
|---|---|---|---|
| Query: | 2150 | GDTAVLDCEVTGDPKPKIFWLLPSNDMISFSIDRYTFHANGSLTINKVKLLDSGEYVCVA | 2209 |
| | | \|++ \| \| +\|\|\| \| \| \|\| + \| + +\|\|\| \| \| \|\|\| \| \|\|\| | |
| Sbjct: | 3 | GESVTLTCPASGDPVPNITWLK-DGKPLPES---RVVASGSTLTIKNVSLEDSGLYTCVA | 58 |
| Query: | 2210 | RNPSG 2214 | |
| | | \|\| \| | |
| Sbjct: | 59 | RNSVG 63 | |

[0354] TABLE 12S

Domain Analysis of NOV12

gnl|Smart″smart00408, IGc2, Immunoglobulin C-2 Type (SEQ ID NO:130)
CD-Length=63 residues, 100.0% aligned
Score=60.1 bits (144). Expect=2e−09

| | | | |
|---|---|---|---|
| Query: | 1752 | HSGSTVELKCRAEGRPSPTVTWILANQTWSESSQGSRQACCTCDGTLVLHNLSIYDRGF | 1811 |
| | | \| +\| \| \| \| \| \| \| +\|\|+ + + \| \|\| + \|+\|+ \| \| | |
| Sbjct: | 1 | LEGESVTLTCPASGDPVPNITWLKDGKPLPESRVVAS-------GSTLTIKNVSLEDSGL | 53 |
| Query: | 1812 | YKCVASNPGG 1821 | |
| | | \| \|\|\| \| \| | |
| Sbjct: | 54 | YTCVARNSVG 63 | |

[0355] TABLE 12T

Domain Analysis of NOV12
gnl|Pfam|pfam01463, LRRCT, Leucine rich repeat C-term-
inal domain. Leucine Rich Repeats pfam00560 are short se-
quence motifs present in a number of proteins with diverse
functions and cellular locations. Leucine Rich Repeats are
often flanked by cysteine rich domains. This domain is
often found at the C-terminus of tandem leucine rich re-
peats. (SEQ ID N0:131)
CD-Length=51 residues, 74.5% aligned
Score=49.7 bits (117), Expect=2e−06

| | | | |
|---|---|---|---|
| Query: | 223 | NPWTCDCHLKWLSDWIQEKPGIYIVLPDVIKCKKDRSPSSAQQ | 265 |
| | | \|\|+ \|\|\| \|+\|\| \|++\| + \|+ ++\| \|\| \| + | |
| Sbjct: | 1 | NPFICDCELRWTLRWLREP--RRLEDPEDLRC---ASPESLRG | 38 |

[0356] TABLE 12U
Domain Analysis of NOV12
gnl|Pfam|pfam00047. ig, Immunoglobulin domain. Members of the
immunoglobulin superfamily are found in hundreds of proteins of
different functions. Examples include antibodies, the giant muscle
kinase titin and receptor tyrosine kinases. Immunoglobulin-like
domains may be involved in protein-protein and protein-ligand
interactions. The Pfam alignments do not include the first and last
strand of the immunoglobulin-like domain. (SEQ ID NO:132)
CD-Length = 68 residues, 100.0% aligned
Score = 45.1 bits (105), Expect = 5e−05

| | | | |
|---|---|---|---|
| Query: | 1851 | GESLKLPCTAXGTP-QPSVYWVLSDGTEVKPL-----QFTNSKLFLFSNGTLYIRNLASS | 1904 |
| | | \|\|\|+ \| \|+ \| \| \|+\| \| \| \|\| \|++ \| + ++ \| \|+ +\| \| ++ | |
| Sbjct: | 1 | GESVTLTCSVSGYPPDPTVTW-LRDGKEIELLGSSESRVSSGGRFSISSLSLTISSVTPE | 59 |
| Query: | 1905 | DRGTYECIA 1913 | |
| | | \| \|\|\| \|+ | |
| Sbjct: | 60 | DSGTYTCVV 68 | |

[0357] TABLE 12V
Domain Analysis of NOV12
gnl|Pfam|pfam00047, ig, Immunoglobulin domain. Members of the
immunoglobulin superfamily are found in hundreds of proteins of
different functions. Examples include antibodies, the giant muscle
kinase titin and receptor tyrosine kinases. immunoglobulin-like
domains may be involved in protein-protein and protein-ligand
interactions. The Pf am alignments do not include the first and last
strand of the immunoglobulin-like domain. (SEQ ID NO:132)
CD-Length = 68 residues, 100.0% aligned
Score = 42.4 bits (98), Expect = 3e−04

| | | | |
|---|---|---|---|
| Query: | 2150 | GDTAVLDCEVTGDPK-PKIFWLLPSNDMISFSIDRYTFHANG-------SLTINKVKLLD | 2201 |
| | | \|++ \| \| \|+\| \| \| + \|\| ++ + \| \|\|\|\|+ \| \| | |
| Sbjct: | 1 | GESVTLTCSVSGYPPDPTVTWLRDGKEIELLGSSESRVSSGGRFSISSLSLTISSVTPED | 60 |
| Query: | 2202 | SGEYVCVA 2209 | |
| | | \|\| \| \|\| | |
| Sbjct: | 61 | SGTYTCVV 68 | |

[0358] Mechanical stress or force is known to be an important modulator of cellular morphology and function in variety of tissues. It has been implicated in stretching the cell membrane and alter receptor or G protein conformation thereby initiating signaling pathways usually used by the growth factors. It has been shown to induce changes in bone, modulate fibrogenic activity of human VSM cells, platelet aggregations and tooth movements (Stoltz et al., 2000, Biorheology vol. 37: 3-14; Nomura S and Takano-YamamotoT 2000, Matrix Biol., vol 19: 91-96; Li C and Xu Q, 2000 Cell Signal vol 12: 435-45). As a response to mechanical stress, expression of many stress related proteins such as HSP 70, glutamate/aspartate transporter, nitric oxide synthetase, prostaglandin G/H synthetase etc. are induced. In case of bone cells the mechanical stress is converted to series of biochemical reactions which activates osteoclasts and oteoblasts to cause bone resorption and formation. Recently, Einat P, Mor O, Skaliter R, Feinstein E, and Faerman A have described a new mechanical stress induced cDNA for protein 608 in rat (Geneseq database) and have implicated its role in osteoporosis. Here we describe a human paralogue of this novel mechanical stress induced protein gene.

[0359] The disclosed NOV12 nucleic acid of the invention encoding a Mechanical Stress Induced Protein-like protein includes the nucleic acid whose sequence is provided in Table 12A or a fragment thereof. The invention also includes a mutant or variant nucleic acid any of whose bases may be changed from the corresponding base shown in Table 12A while still encoding a protein that maintains its Mechanical Stress Induced Protein-like activities and physiological functions, or a fragment of such a nucleic acid. The invention further includes nucleic acids whose sequences are complementary to those just described, including nucleic acid fragments that are complementary to any of the nucleic acids just described. The invention additionally includes nucleic acids or nucleic acid fragments, or complements thereto, whose structures include chemical modifications. Such modifications include, by way of nonlimiting example, modified bases, and nucleic acids whose sugar phosphate backbones are modified or derivatized. These modifications are carried out at least in part to enhance the chemical stability of the modified nucleic acid, such that they may be used, for example, as antisense binding nucleic acids in therapeutic applications in a subject. In the mutant or variant nucleic acids, and their complements, up to about 20% percent of the bases may be so changed.

[0360] The disclosed NOV12 protein of the invention includes the Mechanical Stress Induced Protein-like protein whose sequence is provided in Table 12B. The invention also includes a mutant or variant protein any of whose residues may be changed from the corresponding residue shown in Table 12B while still encoding a protein that maintains its Mechanical Stress Induced Protein-like activities and physiological functions, or a functional fragment thereof. In the mutant or variant protein, up to about 57% percent of the residues may be so changed.

[0361] The invention further encompasses antibodies and antibody fragments, such as F_{ab} or (F_{ab})₂, that bind immunospecifically to any of the proteins of the invention.

[0362] The above defined information for this invention suggests that this Mechanical Stress Induced Protein-like protein (NOV12) may function as a member of a “Mechanical Stress Induced Protein family”. Therefore, the NOV12 nucleic acids and proteins identified here may be useful in potential therapeutic applications implicated in (but not limited to) various pathologies and disorders as indicated below. The potential therapeutic applications for this invention include, but are not limited to: protein therapeutic, small molecule drug target, antibody target (therapeutic, diagnostic, drug targeting/cytotoxic antibody), diagnostic and/or prognostic marker, gene therapy (gene delivery/gene ablation), research tools, tissue regeneration in vivo and in vitro of all tissues and cell types composing (but not limited to) those defined here.

[0363] The NOV12 nucleic acids and proteins of the invention are useful in potential therapeutic applications implicated in cancer including but not limited to various pathologies and disorders as indicated below. For example, a cDNA encoding the Mechanical Stress Induced Protein-like protein (NOV12) may be useful in gene therapy, and the Mechanical Stress Induced Protein-like protein (NOV12) may be useful when administered to a subject in need thereof. By way of nonlimiting example, the compositions of the present invention will have efficacy for treatment of patients suffering from osteoporosis, osteoarthritis, cardiac hypertrophy, atherosclerosis, hypertension, restenosis, and other pathologies and conditions. The NOV12 nucleic acid encoding the Mechanical Stress Induced Protein-like protein of the invention, or fragments thereof, may further be useful in diagnostic applications, wherein the presence or amount of the nucleic acid or the protein are to be assessed.

[0364] NOV12 nucleic acids and polypeptides are further useful in the generation of antibodies that bind immuno-specifically to the novel NOV12 substances for use in therapeutic or diagnostic methods. These antibodies may be generated according to methods known in the art, using prediction from hydrophobicity charts, as described in the “Anti-NOVX Antibodies” section below. These novel proteins can be used in assay systems for functional analysis of various human disorders, which will help in understanding of pathology of the disease and development of new drug targets for various disorders.

[0365] NOV13

[0366] A disclosed NOV13a nucleic acid of 840 nucleotides (also referred to as Curagen Accession No. CG55908-01) encoding a novel Integrin-like FG-GAP domain containing novel protein-like protein is shown in Table 13A. An open reading frame was identified beginning with an GCC initiation codon at nucleotides 24 and ending with a TAA codon at nucleotides 836-838. The untranslated regions are underlined and the start and stop codons are in bold letters in Table 13A. The start codon for NOV13 is not a traditional initiation codon. Therefore, NOV13 may be a partial open reading frame extending further into the 5′ region.

TABLE 13A
NOV13a nucleotide sequence.

(SEQ ID NO:57)

GGCCTCCGGGATTTGCTACCTTTTTGGCTCCCTGCTCGTCGAACTGCTCTTCTCACGGGCTGTCGCCTTCAA
TCTGGACGTGATGGGTGCCTTGCGCAAGGAGGGCGAGCCAGGCAGCCTCTTCGGCTTCTCTGTGGCCCTGCA
CCGGCAGTTGCAGCCCCGACCCCAGAGCTGGCTGCTGGTGGGTGCTCCCCAGGCCCTGGCTCTTCCTGGGCA
GCAGGCGAATCGCACTGGAGGCCTCTTCGCTTGCCCGTTGAGCCTGGAGGAGACTGACTGCTACAGAGTGGA
CATCGACCAGGGAGCTGATATGCAAAAGGAAAGCAAGGAGAACCAGTGGTTGGGAGTCAGTGTTCGGAGCCA
GGGGCCTGGGGGCAACATTGTTGACTGCGCCCGGGGCACGGCCAACTGTGTGGTGTTCAGCTGCCCACTCTA
CAGCTTTGACCGCGCGGCTGTGCTGCATGTCTGGGGCCGTCTCTGGAACAGCACCTTTCTGGAGGAGTACTC
AGCTGTGAAGTCCCTGGAAGTGATTGTCCGGGCCAACATCACAGTGAAGTCCTCCATAAAGAACTTGATGCT
CCGAGATGCCTCCACAGTGATCCCAGTGATGGTATACTTGGACCCCATGGCTGTGGTGGCAGAAGGAGTGCC
CTGGTGGGTCATCCTCCTGGCTGTACTGGCTGGGCTGCTGGTGCTAGCACTGCTGGTGCTGCTCCTGTGGAA
GTGTGGCTTCTTCCATCGGAGCAGCCAGAGCTCATCTTTTCCCACCAACTATCACCGGGCCTGTCTGGCTGT
GCAGCCTTCAGCCATGGAAGTTGGGGGTCCAGGGACTGTGGGGTAACT

[0367] In a search of public sequence databases, the NOV13a nucleic acid sequence, located on the q13 region of chromosome 12, has 388 of 392 bases (98%) identical to a gb:GENBANK-ID:AF072132|acc:AF072132.1 mRNA from Homo sapiens (Homo sapiens integrin alpha-7 mRNA, complete cds) (E=3.9e⁻⁸¹). Public nucleotide databases include all GenBank databases and the GeneSeq patent database.

[0368] The disclosed NOV13a polypeptide (SEQ ID NO 58) encoded by SEQ ID NO: 57 has 278 amino acid residues and is presented in Table 13B using the one-letter amino acid code. Signal P, Psort and/or Hydropathy results predict that NOV13a has no signal peptide and is likely to be localized in the plasma membrane with a certainty of 0.7300. In other embodiments, NOV13a may also be localized to the endoplasmic reticulum (membrane) with acertainty of 0.6400, the microbody (peroxisome) with a certainty of 0.1665, or in the endoplasmic reticulum (lumen) with a certainty of 0.1000. The most likely cleavage site for NOV13 is between positions 22 and 23: AVA-FN.

TABLE 13B
Encoded NOV13a protein sequence.

(SEQ ID NO:58)

ASGICYLFGSLLVELLFSRAVAFNLDVMGALRKEGEPGSLFGFSVALHRQLQPRPQSWLLVGAPQALALPGQ
QANRTGGLFACPLSLEETDCYRVDIDQGADMQKESKENQWLGVSVRSQGPGGKIVDCARGTANCVVFSCPLY
SFDRAAVLHVWGRLWNSTFLEEYSAVKSLEVIVRANITVKSSIKNLMLRDASTVIPVMNYLDPMAVVAEGVP
WWVILLAVLAGLLVLALLVLLLW1CCGFFHRSSQSSSFPTNHRACLAVQPSAMEVGGPGTVG

[0369] A search of sequence databases reveals that the NOV13a amino acid sequence has 158 of 225 amino acid residues (70%) identical to, and 170 of 225 amino acid residues (75%) similar to, the 1161 amino acid residue ptnr:SPTREMBL-ACC:O88731 protein from Mus musculus (Mouse) (Integrin Alpha 7 Precursor) (E=3.7e⁻⁷⁵). Public amino acid databases include the GenBank databases, SwissProt, PDB and PIR.

[0370] NOV13 is expressed in at least the following tissues: brain, lymph node. This information was derived by determining the tissue sources of the sequences that were included in the invention including but not limited to SeqCalling sources, Public EST sources, Literature sources, and/or RACE sources.

[0371] The disclosed NOV13a polypeptide has homology to the amino acid sequences shown in the BLASTP data listed in Table 13C.

TABLE 13C
BLAST results for NOV13a

| Gene Index/ | | Length | Identity | Positives | |
|---|---|---|---|---|---|
| Identifier | Protein/Organism | (aa) | (%) | (%) | Expect |
| gi\|3378243\|emb\| | integrin alpha 7 | 1161 | 128/175 | 133/175 | 7e−67 |
| CAA73024.1\| | [Mus musculus] | | (73%) | (75%) | |
| (Y12380) | | | | | |
| gi\|12643723\|sp\| | Integrin alpha-7 | 1181 | 116/130 | 116/130 | 4e−62 |
| Q13683\| | precurso | | (89%) | (89%) | |
| ITA7_HUMAN | | | | | |
| gi\|3158408\|gb\| | integrin alpha 7 | 1137 | 116/130 | 116/130 | 4e−62 |
| AAC18968.1\| | [Homo sapiens] | | (89%) | (89%) | |
| (AF052050) | | | | | |
| gi\|4504753\|ref\|NP_0 | integrin alpha 7 | 1137 | 116/130 | 116/130 | 4e−62 |
| 02197.1\| | precursor [Homo sapiens] | | (89%) | (89%) | |
| (NM_002206) | | | | | |
| gi\|4699891\|emb\| | integrin alpha 7 | 1141 | 116/130 | 116/130 | 5e−62 |
| CAB41534.1\| | chain [Homo sapiens] | | (89%) | (89%) | |
| (AJ228836) | | | | | |

[0372] The homology between these and other sequences is shown graphically in the ClustalW analysis shown in Table 13D. In the ClustalW alignment of the NOV13 protein, as well as all other ClustalW analyses herein, the black outlined amino acid residues indicate regions of conserved sequence (i.e., regions that may be required to preserve structural or functional properties), whereas non-highlighted amino acid residues are less conserved and can potentially be altered to a much broader extent without altering protein structure or function.

[image]

[image]

[image]

[0373] The integrins are a family of heterodimeric membrane glycoproteins that mediate a wide spectrum of cell-cell and cell-matrix interactions. Their capacity to participate in cellular adhesive processes underlies a wide range of functions. The integrins have preeminent roles in cell migration and morphologic development, differentiation, and metastasis. To a large extent, the diversity and specificity of functions mediated by integrins rest in the structural diversity of the 16 different alpha and 8 beta chains that have been identified and in their ligand-binding and signal transduction capacity. One structural difference in the alpha chains appears to divide them into 2 subgroups. The I-integrin alpha chains have an insertion of about 180 amino acids in the extracellular region, and the non-I-integrins do not. The functional significance of the I-domain is not known. Alternate splicing increases the structural diversity in the cytoplasmic domains of several integrin alpha and beta chains, and this presumably further expands their functional repertoire.

[0374] Expression of the alpha-7 integrin gene (ITGA7) is developmentally regulated during the formation of skeletal muscle. Increased levels of expression and production of isoforms containing different cytoplasmic and extracellular domains accompany myogenesis. From examining the rat and human genomes by Southern blot analysis₄and in situ hybridization, Wang et al. (1995) determined that both genomes contain a single alpha-7 gene. In the human, ITGA7 is present on 12q13, as localized by fluorescence in situ hybridization (Wang et al., 1995). Phylogenetic analysis of the integrin alpha-chain sequences suggested that the early integrin genes evolved in 2 pathways to form the I-integrins and the non-I-integrins. The I-integrin alpha chains apparently arose as a result of an early insertion into the non-I-gene. The I-chain subfamily further evolved by duplications within the same chromosome. The non-I-integrin alpha-chain genes are located in clusters on chromosomes 2, 12, and 17, which coincides closely with the localization of the human homeobox gene clusters. Non-I-integrin alpha-chain genes appear to have evolved in parallel and in proximity to the HOX clusters. Thus, the HOX genes that underlie the design of body structure and the integrin genes that underlie informed cell-cell and cell-matrix interactions appear to have evolved in parallel and coordinate fashions.

[0375] ITGA7 is a specific cellular receptor for the basement membrane protein laminin-1, as well as for the laminin isoforms-2 and -4. The alpha-7 subunit is expressed mainly in skeletal and cardiac muscle and may be involved in differentiation and migration processes during myogenesis. Three cytoplasmic and 2 extracellular splice variants are developmentally regulated and expressed in different sites in the muscle. In adult muscle, the alpha-7A and alpha-7B subunits are concentrated in myotendinous junctions but can also be detected in neuromuscular junctions and along the sarcolemmal membrane. To study the involvement of alpha-7 integrin during myogenesis and its role in muscle integrity and function, Mayer et al. (1997) generated a null allele of the ITGA7 gene in the germline of mice by homologous recombination in embryonic stem (ES) cells. To their surprise, mice homozygous for the mutation were viable and fertile, indicating that the gene is not essential for myogenesis. However, histologic analysis of skeletal muscle showed typical signs of progressive muscular dystrophy starting soon after birth, but with a distinct variability in different muscle types. The histopathologic changes indicated an impairment of function of the myotendinous junctions. Thus, ITGA7 represents an indispensable linkage between the muscle fiber and extracellular matrix that is independent of the dystrophin-dystroglycan complex-mediated interaction of the cytoskeleton with the muscle basement membrane.

[0376] The basal lamina of muscle fibers plays a crucial role in the development and function of skeletal muscle. An important laminin receptor in muscle is integrin alpha-7/beta-1D. Integrin beta-1 (ITGB1; 135630) is expressed throughout the body, while integrin alpha-7 is more muscle-specific. To address the role of integrin alpha-7 in human muscle disease, Hayashi et al. (1998) determined alpha-7 protein expression in muscle biopsies from 117 patients with unclassified congenital myopathy and congenital muscular dystrophy by immunocytochemistry. They found 3 unrelated patients with integrin alpha-7 deficiency and normal laminin alpha-2 chain expression. (Deficiency of LAMA2 (156225) causes congenital muscular dystrophy, and a secondary deficiency of integrin alpha-7 was observed in some cases.) The 3 patients were found to carry mutations in the ITGA7 gene. Hayashi et al. (1998) noted that the finding in these patients accords well with the findings in Itga7 knockout mice (Mayer et al., 1997).

[0377] ALLELIC VARIANTS (selected examples)

[0378] 0.0001 MYOPATHY, CONGENITAL [ITGA7, 21-BP INS]

[0379] In a 4-year-old Japanese boy born at term from nonconsanguineous parents, Hayashi et al. (1998) observed compound heterozygosity for 2 splicing mutations: one causing a 21-bp insertion in the conserved cysteine-rich region and the other causing a 98-bp deletion. The child's psychomotor milestones were delayed; he acquired the ability to roll over at 9 months, and walked at 2.5 years. He could not jump or run. Mental retardation was also observed, and verbal abilities were limited to only a few words. Serum creatine kinase (CK) activity was mildly elevated. Brain MRI and EEG were normal. It was unclear whether mental retardation was caused by alpha-7-deficiency, but Hayashi et al. (1998) observed that alpha-7 is also expressed in the developing nervous system. Muscle biopsy at 15 months showed changes consistent with congenital myopathy. Sequence analysis of genomic DNA from this patient showed an A-to-G transition at position −2 of the splice-acceptor site in cDNA nucleotide 1506, and a T-to-C substitution at the splice-donor site at position +2 in cDNA nucleotide 2712, respectively. The second mutation was found in the unaffected father, whereas the first was not detected in either parent, suggesting a new mutation.

[0380] 0.0002 MYOPATHY, CONGENITAL [ITGA7, 98-BP DEL]

[0381] See 600536.0001 and Hayashi et al. (1998). The 98-bp frameshift deletion caused a premature termination codon 12 bp downstream.

[0382] 0.0003 MYOPATHY, CONGENITAL [ITGA7,]

[0383] In an 11-year-old Japanese girl with nonconsanguineous parents and signs of congenital myopathy, Hayashi et al. (1998) found compound heterozygosity for the 98-bp deletion (600536.0002) and a 1-bp frameshift deletion at cDNA nucleotide 1204, which created a premature termination codon at amino acid 505. At 2 months of age, the girl was diagnosed with congenital dislocation of the hip and torticollis, which required surgical intervention. She acquired independent ambulation at 2 years, and Gowers sign and waddling gait were observed. She had never been able to climb stairs without support and could not run. There was no cognitive impairment. Serum CK was mildly elevated. Muscle biopsy showed changes consistent with congenital myopathy, with substantial fatty replacement and fiber size variation.

[0384] Another patient with congenital myopathy and marked deficiency of ITGA7 mRNA showed hypotonia and torticollis from birth. No mutation was identified in the ITGA7 cDNA.

### References

[0385] 1. Hayashi, Y. K.; Chou, F.-L.; Engvall, E.; Ogawa, M.; Matsuda, C.; Hirabayashi, S.; Yokochi, K.; Ziober, B. L.; Kramer, R. H.; Kaufman, S. J.; Ozawa, E.;Goto, Y.; Nonaka, I.; Tsukahara, T.; Wang, J.; Hoffman, E. P.; Arahata, K.: Mutations in the integrin alpha-7 gene cause congenital myopathy. Nature Genet. 19: 94-97, 1998. PubMed ID: 9590299

[0386] 2. Mayer, U.; Saher, G.; Fassler, R.; Bornemann, A.; Echtermeyer, F.; von der Mark, H.; Miosge, N.; Poschl, E.; von der Mark, K.: Absence of integrin alpha-7 causes a novel form of muscular dystrophy. Nature Genet. 17: 318-323, 1997. PubMed ID: 9354797

[0387] 3. Wang, W.; Wu, W.; Desai, T.; Ward, D. C.; Kaufman, S. J.: Localization of the alpha-7 integrin gene (ITGA7) on human chromosome 12q13: clustering of integrin and Hox genes implies parallel evolution of these gene families. Genomics 26: 563-570, 1995.

[0388] The disclosed NOV13 nucleic acid of the invention encoding a Integrin-like FG-GAP domain containing novel protein-like protein includes the nucleic acid whose sequence is provided in Table 13A or a fragment thereof. The invention also includes a mutant or variant nucleic acid any of whose bases may be changed from the corresponding base shown in Table 13A while still encoding a protein that maintains its Integrin-like FG-GAP domain containing novel protein-like activities and physiological functions, or a fragment of such a nucleic acid. The invention further includes nucleic acids whose sequences are complementary to those just described, including nucleic acid fragments that are complementary to any of the nucleic acids just described. The invention additionally includes nucleic acids or nucleic acid fragments, or complements thereto, whose structures include chemical modifications. Such modifications include, by way of nonlimiting example, modified bases, and nucleic acids whose sugar phosphate backbones are modified or derivatized. These modifications are carried out at least in part to enhance the chemical stability of the modified nucleic acid, such that they may be used, for example, as antisense binding nucleic acids in therapeutic applications in a subject. In the mutant or variant nucleic acids, and their complements, up to about 2% percent of the bases may be so changed.

[0389] The disclosed NOV13 protein of the invention includes the Integrin-like FG-GAP domain containing novel protein-like protein whose sequence is provided in Table 13B. The invention also includes a mutant or variant protein any of whose residues may be changed from the corresponding residue shown in Table 13B while still encoding a protein that maintains its Integrin-like FG-GAP domain containing novel protein-like activities and physiological functions, or a functional fragment thereof. In the mutant or variant protein, up to about 30% percent of the residues may be so changed.

[0390] The invention further encompasses antibodies and antibody fragments, such as F_{ab} or (F_{ab})₂, that bind immunospecifically to any of the proteins of the invention.

[0391] The above defined information for this invention suggests that this Integrin-like FG-GAP domain containing novel protein-like protein (NOV13) may function as a member of a “Integrin-like FG-GAP domain containing novel protein family”. Therefore, the NOV13 nucleic acids and proteins identified here may be useful in potential therapeutic applications implicated in (but not limited to) various pathologies and disorders as indicated below. The potential therapeutic applications for this invention include, but are not limited to: protein therapeutic, small molecule drug target, antibody target (therapeutic, diagnostic, drug targeting/cytotoxic antibody), diagnostic and/or prognostic marker, gene therapy (gene delivery/gene ablation), research tools, tissue regeneration in vivo and in vitro of all tissues and cell types composing (but not limited to) those defined here.

[0392] The NOV13 nucleic acids and proteins of the invention are useful in potential therapeutic applications implicated in cancer including but not limited to various pathologies and disorders as indicated below. For example, a cDNA encoding the Integrin-like FG-GAP domain containing novel protein-like protein (NOV13) may be useful in gene therapy, and the Integrin-like FG-GAP domain containing novel protein-like protein (NOV13) may be useful when administered to a subject in need thereof. By way of nonlimiting example, the compositions of the present invention will have efficacy for treatment of patients suffering from Achalasia-addisonianism-alacrimia syndrome; Cataract, polymorphic and lamellar, Cyclic ichthyosis with epidermolytic hyperkeratosis; Diabetes insipidus, nephrogenic, autosomal dominant; Diabetes insipidus, nephrogenic, autosomal recessive; Enuresis, nocturnal, 2; Epidermolysis bullosa simplex, Koebner, Dowling-Meara, and Weber-Cockayne types; Epidermolytic hyperkeratosis; Fundus albipunctatus; Glioma; Ichthyosis bullosa of Siemens; Keratoderma, palmoplantar, nonepidermolytic; Meesmann corneal dystrophy; Monilethrix; Myopathy, congenital; Pachyonychia congenita, Jackson-Lawler type; Pachyonychia congenita, Jadassohn-Lewandowsky type; Palmoplantar keratoderma, Bothnia type; Persistent Mullerian duct syndrome, type II; Spastic paraplegia-10; White sponge nevus; Liver disease, susceptibility to, from hepatotoxins or viruses; Von Hippel-Lindau (VHL) syndrome, Alzheimer's disease, stroke, tuberous sclerosis, hypercalceimia, Parkinson's disease, Huntington's disease, cerebral palsy, epilepsy, Lesch-Nyhan syndrome, multiple sclerosis, ataxia-telangiectasia, leukodystrophies, behavioral disorders, addiction, anxiety, pain, neuroprotection; lymphedema, allergies, and other pathologies and conditions. The NOV13 nucleic acid encoding the Integrin-like FG-GAP domain containing novel protein-like protein of the invention, or fragments thereof, may further be useful in diagnostic applications, wherein the presence or amount of the nucleic acid or the protein are to be assessed.

[0393] NOV13 nucleic acids and polypeptides are further useful in the generation of antibodies that bind immuno-specifically to the novel NOV13 substances for use in therapeutic or diagnostic methods. These antibodies may be generated according to methods known in the art, using prediction from hydrophobicity charts, as described in the “Anti-NOVX Antibodies” section below. The disclosed NOV13 protein has multiple hydrophilic regions, each of which can be used as an immunogen. In one embodiment, a contemplated NOV13 epitope is from about amino acids 30 to 130. In another embodiment, a NOV13 epitope is from about amino acids 240 to 270. These novel proteins can be used in assay systems for functional analysis of various human disorders, which will help in understanding of pathology of the disease and development of new drug targets for various disorders.

[0394] NOVX Nucleic Acids and Polypeptides

[0395] One aspect of the invention pertains to isolated nucleic acid molecules that encode NOVX polypeptides or biologically active portions thereof. Also included in the invention are nucleic acid fragments sufficient for use as hybridization probes to identify NOVX-encoding nucleic acids (e.g., NOVX mRNAs) and fragments for use as PCR primers for the amplification and/or mutation of NOVX nucleic acid molecules. As used herein, the term “nucleic acid molecule” is intended to include DNA molecules (e.g., cDNA or genomic DNA), RNA molecules (e.g., mRNA), analogs of the DNA or RNA generated using nucleotide analogs, and derivatives, fragments and homologs thereof. The nucleic acid molecule may be single-stranded or double-stranded, but preferably is comprised double-stranded DNA.

[0396] An NOVX nucleic acid can encode a mature NOVX polypeptide. As used herein, a “mature” form of a polypeptide or protein disclosed in the present invention is the product of a naturally occurring polypeptide or precursor form or proprotein. The naturally occurring polypeptide, precursor or proprotein includes, by way of nonlimiting example, the full-length gene product, encoded by the corresponding gene. Alternatively, it may be defined as the polypeptide, precursor or proprotein encoded by an ORF described herein. The product “mature” form arises, again by way of nonlimiting example, as a result of one or more naturally occurring processing steps as they may take place within the cell, or host cell, in which the gene product arises. Examples of such processing steps leading to a “mature” form of a polypeptide or protein include the cleavage of the N-terminal methionine residue encoded by the initiation codon of an ORF, or the proteolytic cleavage of a signal peptide or leader sequence. Thus a mature form arising from a precursor polypeptide or protein that has residues 1 to N, where residue 1 is the N-terminal methionine, would have residues 2 through N remaining after removal of the N-terminal methionine. Alternatively, a mature form arising from a precursor polypeptide or protein having residues 1 to N, in which an N-terminal signal sequence from residue 1 to residue M is cleaved, would have the residues from residue M+1 to residue N remaining. Further as used herein, a “mature” form of a polypeptide or protein may arise from a step of post-translational modification other than a proteolytic cleavage event. Such additional processes include, by way of non-limiting example, glycosylation, myristoylation or phosphorylation. In general, a mature polypeptide or protein may result from the operation of only one of these processes, or a combination of any of them.

[0397] The term “probes”, as utilized herein, refers to nucleic acid sequences of variable length, preferably between at least about 10 nucleotides (nt), 100 nt, or as many as approximately, e.g., 6,000 nt, depending upon the specific use. Probes are used in the detection of identical, similar, or complementary nucleic acid sequences. Longer length probes are generally obtained from a natural or recombinant source, are highly specific, and much slower to hybridize than shorter-length oligomer probes. Probes may be single- or double-stranded and designed to have specificity in PCR, membrane-based hybridization technologies, or ELISA-like technologies.

[0398] The term “isolated” nucleic acid molecule, as utilized herein, is one, which is separated from other nucleic acid molecules which are present in the natural source of the nucleic acid. Preferably, an “isolated” nucleic acid is free of sequences which naturally flank the nucleic acid (i.e., sequences located at the 5′- and 3′-termini of the nucleic acid) in the genomic DNA of the organism from which the nucleic acid is derived. For example, in various embodiments, the isolated NOVX nucleic acid molecules can contain less than about 5 kb, 4 kb, 3 kb, 2 kb, 1 kb, 0.5 kb or 0.1 kb of nucleotide sequences which naturally flank the nucleic acid molecule in genomic DNA of the cell/tissue from which the nucleic acid is derived (e.g., brain, heart, liver, spleen, etc.). Moreover, an “isolated” nucleic acid molecule, such as a cDNA molecule, can be substantially free of other cellular material or culture medium when produced by recombinant techniques, or of chemical precursors or other chemicals when chemically synthesized.

[0399] A nucleic acid molecule of the invention, e.g., a nucleic acid molecule having the nucleotide sequence SEQ ID NOS: 1, 3, 5, 7, 9, 11, 13, 15, 17, 19, 21, 23, 25, 27, 29, 31, 33, 35, 37, 39, 41, 43, 45, 47, 49, 51, 53, 55, and 57, or a complement of this aforementioned nucleotide sequence, can be isolated using standard molecular biology techniques and the sequence information provided herein. Using all or a portion of the nucleic acid sequence of SEQ ID NOS: 1, 3, 5, 7, 9, 11, 13, 15, 17, 19, 21, 23, 25, 27, 29, 31, 33, 35, 37, 39, 41, 43, 45, 47, 49, 51, 53, 55, and 57 as a hybridization probe, NOVX molecules can be isolated using standard hybridization and cloning techniques (e.g., as described in Sambrook, et al., (eds.), Molecular Cloning: A Laboratory Manual 2^{nd} Ed., Cold Spring Harbor Laboratory Press, Cold Spring Harbor, N.Y., 1989; and Ausubel, et al., (eds.), Current Protocols in Molecular Biology, John Wiley & Sons, New York, N.Y., 1993.)

[0400] A nucleic acid of the invention can be amplified using cDNA, mRNA or alternatively, genomic DNA, as a template and appropriate oligonucleotide primers according to standard PCR amplification techniques. The nucleic acid so amplified can be cloned into an appropriate vector and characterized by DNA sequence analysis. Furthermore, oligonucleotides corresponding to NOVX nucleotide sequences can be prepared by standard synthetic techniques, e.g., using an automated DNA synthesizer.

[0401] As used herein, the term “oligonucleotide” refers to a series of linked nucleotide residues, which oligonucleotide has a sufficient number of nucleotide bases to be used in a PCR reaction. A short oligonucleotide sequence may be based on, or designed from, a genomic or cDNA sequence and is used to amplify, confirm, or reveal the presence of an identical, similar or complementary DNA or RNA in a particular cell or tissue. Oligonucleotides comprise portions of a nucleic acid sequence having about 10 nt, 50 nt, or 100 nt in length, preferably about 15 nt to 30 nt in length. In one embodiment of the invention, an oligonucleotide comprising a nucleic acid molecule less than 100 nt in length would further comprise at least 6 contiguous nucleotides SEQ ID NOS: 1, 3, 5, 7, 9, 11, 13, 15, 17, 19, 21, 23, 25, 27, 29, 31, 33, 35, 37, 39, 41, 43, 45, 47, 49, 51, 53, 55, and 57, or a complement thereof. Oligonucleotides may be chemically synthesized and may also be used as probes.

[0402] In another embodiment, an isolated nucleic acid molecule of the invention comprises a nucleic acid molecule that is a complement of the nucleotide sequence shown in SEQ ID NOS: 1,3, 5, 7, 9, 11, 13, 15, 17, 19, 21, 23, 25, 27, 29, 31, 33, 35, 37, 39, 41, 43, 45, 47, 49, 51, 53, 55, and 57, or a portion of this nucleotide sequence (e.g., a fragment that can be used as a probe or primer or a fragment encoding a biologically-active portion of an NOVX polypeptide). A nucleic acid molecule that is complementary to the nucleotide sequence shown SEQ ID NOS: 1, 3, 5, 7, 9, 11, 13, 15, 17, 19, 21, 23, 25, 27, 29, 31, 33, 35, 37, 39, 41, 43, 45, 47, 49, 51, 53, 55, or 57 is one that is sufficiently complementary to the nucleotide sequence shown SEQ ID NOS: 1, 3, 5, 7, 9, 11, 13, 15, 17, 19, 21, 23, 25, 27, 29, 31, 33, 35, 37, 39, 41, 43, 45, 47, 49, 51, 53, 55, or 57 that it can hydrogen bond with little or no mismatches to the nucleotide sequence shown SEQ ID NOS: 1, 3, 5, 7, 9, 11, 13, 15, 17, 19, 21, 23, 25, 27, 29, 31, 33, 35, 37, 39, 41, 43, 45, 47, 49, 51, 53, 55, and 57, thereby forming a stable duplex.

[0403] As used herein, the term “complementary” refers to Watson-Crick or Hoogsteen base pairing between nucleotides units of a nucleic acid molecule, and the term “binding” means the physical or chemical interaction between two polypeptides or compounds or associated polypeptides or compounds or combinations thereof. Binding includes ionic, non-ionic, van der Waals, hydrophobic interactions, and the like. A physical interaction can be either direct or indirect. Indirect interactions may be through or due to the effects of another polypeptide or compound. Direct binding refers to interactions that do not take place through, or due to, the effect of another polypeptide or compound, but instead are without other substantial chemical intermediates.

[0404] Fragments provided herein are defined as sequences of at least 6 (contiguous) nucleic acids or at least 4 (contiguous) amino acids, a length sufficient to allow for specific hybridization in the case of nucleic acids or for specific recognition of an epitope in the case of amino acids, respectively, and are at most some portion less than a full length sequence. Fragments may be derived from any contiguous portion of a nucleic acid or amino acid sequence of choice. Derivatives are nucleic acid sequences or amino acid sequences formed from the native compounds either directly or by modification or partial substitution. Analogs are nucleic acid sequences or amino acid sequences that have a structure similar to, but not identical to, the native compound but differs from it in respect to certain components or side chains. Analogs may be synthetic or from a different evolutionary origin and may have a similar or opposite metabolic activity compared to wild type. Homologs are nucleic acid sequences or amino acid sequences of a particular gene that are derived from different species.

[0405] Derivatives and analogs may be full length or other than full length, if the derivative or analog contains a modified nucleic acid or amino acid, as described below. Derivatives or analogs of the nucleic acids or proteins of the invention include, but are not limited to, molecules comprising regions that are substantially homologous to the nucleic acids or proteins of the invention, in various embodiments, by at least about 70%, 80%, or 95% identity (with a preferred identity of 80-95%) over a nucleic acid or amino acid sequence of identical size or when compared to an aligned sequence in which the alignment is done by a computer homology program known in the art, or whose encoding nucleic acid is capable of hybridizing to the complement of a sequence encoding the aforementioned proteins under stringent, moderately stringent, or low stringent conditions. See e.g. Ausubel, et al., Current Protocols in Molecular Biology, John Wiley & Sons, New York, N.Y., 1993, and below.

[0406] A “homologous nucleic acid sequence” or “homologous amino acid sequence,” or variations thereof, refer to sequences characterized by a homology at the nucleotide level or amino acid level as discussed above. Homologous nucleotide sequences encode those sequences coding for isoforms of NOVX polypeptides. Isoforms can be expressed in different tissues of the same organism as a result of, for example, alternative splicing of RNA. Alternatively, isoforms can be encoded by different genes. In the invention, homologous nucleotide sequences include nucleotide sequences encoding for an NOVX polypeptide of species other than humans, including, but not limited to: vertebrates, and thus can include, e.g., frog, mouse, rat, rabbit, dog, cat cow, horse, and other organisms. Homologous nucleotide sequences also include, but are not limited to, naturally occurring allelic variations and mutations of the nucleotide sequences set forth herein. A homologous nucleotide sequence does not, however, include the exact nucleotide sequence encoding human NOVX protein. Homologous nucleic acid sequences include those nucleic acid sequences that encode conservative amino acid substitutions (see below) in SEQ ID NOS: 1, 3, 5, 7, 9, 11, 13, 15, 17, 19, 21, 23, 25, 27, 29, 31, 33, 35, 37, 39, 41, 43, 45, 47, 49, 51, 53, 55, and 57, as well as a polypeptide possessing NOVX biological activity. Various biological activities of the NOVX proteins are described below.

[0407] An NOVX polypeptide is encoded by the open reading frame (“ORF”) of an NOVX nucleic acid. An ORF corresponds to a nucleotide sequence that could potentially be translated into a polypeptide. A stretch of nucleic acids comprising an ORF is uninterrupted by a stop codon. An ORF that represents the coding sequence for a full protein begins with an ATG “start” codon and terminates with one of the three “stop” codons, namely, TAA, TAG, or TGA. For the purposes of this invention, an ORF may be any part of a coding sequence, with or without a start codon, a stop codon, or both. For an ORF to be considered as a good candidate for coding for a bona fide cellular protein, a minimum size requirement is often set, e.g., a stretch of DNA that would encode a protein of 50 amino acids or more.

[0408] The nucleotide sequences determined from the cloning of the human NOVX genes allows for the generation of probes and primers designed for use in identifying and/or cloning NOVX homologues in other cell types, e.g. from other tissues, as well as NOVX homologues from other vertebrates. The probe/primer typically comprises substantially purified oligonucleotide. The oligonucleotide typically comprises a region of nucleotide sequence that hybridizes under stringent conditions to at least about 12, 25, 50, 100, 150, 200, 250, 300, 350 or 400 consecutive sense strand nucleotide sequence SEQ ID NOS: 1, 3, 5, 7, 9, 11, 13, 15, 17, 19, 21, 23, 25, 27, 29, 31, 33, 35, 37, 39, 41, 43, 45, 47, 49, 51, 53, 55, or 57; or an anti-sense strand nucleotide sequence of SEQ ID NOS: 1, 3, 5, 7, 9, 11, 13, 15, 17, 19, 21, 23, 25, 27, 29, 31, 33, 35, 37, 39, 41, 43, 45, 47, 49, 51, 53, 55, or 57; or of a naturally occurring mutant of SEQ ID NOS: 1, 3, 5, 7, 9, 11, 13, 15, 17, 19, 21, 23, 25, 27, 29, 31, 33, 35, 37, 39, 41, 43, 45, 47, 49, 51, 53, 55, and 57.

[0409] Probes based on the human NOVX nucleotide sequences can be used to detect transcripts or genomic sequences encoding the same or homologous proteins. In various embodiments, the probe further comprises a label group attached thereto, e.g. the label group can be a radioisotope, a fluorescent compound, an enzyme, or an enzyme co-factor. Such probes can be used as a part of a diagnostic test kit for identifying cells or tissues which mis-express an NOVX protein, such as by measuring a level of an NOVX-encoding nucleic acid in a sample of cells from a subject e.g., detecting NOVX mRNA levels or determining whether a genomic NOVX gene has been mutated or deleted.

[0410] “A polypeptide having a biologically-active portion of an NOVX polypeptide” refers to polypeptides exhibiting activity similar, but not necessarily identical to, an activity of a polypeptide of the invention, including mature forms, as measured in a particular biological assay, with or without dose dependency. A nucleic acid fragment encoding a “biologically-active portion of NOVX” can be prepared by isolating a portion SEQ ID NOS: 1, 3, 5, 7, 9, 11, 13, 15, 17, 19, 21, 23, 25, 27, 29, 31, 33, 35, 37, 39, 41, 43, 45, 47, 49, 51, 53, 55, or 57, that encodes a polypeptide having an NOVX biological activity (the biological activities of the NOVX proteins are described below), expressing the encoded portion of NOVX protein (e.g., by recombinant expression in vitro) and assessing the activity of the encoded portion of NOVX.

[0411] NOVX Nucleic Acid and Polypeptide Variants

[0412] The invention further encompasses nucleic acid molecules that differ from the nucleotide sequences shown in SEQ ID NOS: 1, 3, 5, 7, 9, 11, 13, 15, 17, 19, 21, 23, 25, 27, 29, 31, 33, 35, 37, 39, 41, 43, 45, 47, 49, 51, 53, 55, and 57 due to degeneracy of the genetic code and thus encode the same NOVX proteins as that encoded by the nucleotide sequences shown in SEQ ID NOS: 1, 3, 5, 7, 9, 11, 13, 15, 17, 19, 21, 23, 25, 27, 29, 31, 33, 35, 37, 39, 41, 43, 45, 47, 49, 51, 53, 55, and 57. In another embodiment, an isolated nucleic acid molecule of the invention has a nucleotide sequence encoding a protein having an amino acid sequence shown in SEQ ID NOS: 2, 4, 6, 8, 10, 12, 14, 16, 18, 20, 22, 24, 26, 28, 30, 32, 34, 26, 28, 40, 42, 44, 46, 48, 50, 52, 54, 56, or 58.

[0413] In addition to the human NOVX nucleotide sequences shown in SEQ ID NOS: 1, 3, 5, 7, 9, 11, 13, 15, 17, 19, 21, 23, 25, 27, 29, 31, 33, 35, 37, 39,41, 43, 45, 47, 49, 51, 53, 55, and 57, it will be appreciated by those skilled in the art that DNA sequence polymorphisms that lead to changes in the amino acid sequences of the NOVX polypeptides may exist within a population (e.g., the human population). Such genetic polymorphism in the NOVX genes may exist among individuals within a population due to natural allelic variation. As used herein, the terms “gene” and “recombinant gene” refer to nucleic acid molecules comprising an open reading frame (ORF) encoding an NOVX protein, preferably a vertebrate NOVX protein. Such natural allelic variations can typically result in 1-5% variance in the nucleotide sequence of the NOVX genes. Any and all such nucleotide variations and resulting amino acid polymorphisms in the NOVX polypeptides, which are the result of natural allelic variation and that do not alter the functional activity of the NOVX polypeptides, are intended to be within the scope of the invention.

[0414] Moreover, nucleic acid molecules encoding NOVX proteins from other species, and thus that have a nucleotide sequence that differs from the human SEQ ID NOS: 1, 3, 5, 7, 9, 11, 13, 15, 17, 19, 21, 23, 25, 27, 29, 31, 33, 35, 37, 39, 41, 43, 45, 47, 49, 51, 53, 55, and 57 are intended to be within the scope of the invention. Nucleic acid molecules corresponding to natural allelic variants and homologues of the NOVX cDNAs of the invention can be isolated based on their homology to the human NOVX nucleic acids disclosed herein using the human cDNAs, or a portion thereof, as a hybridization probe according to standard hybridization techniques under stringent hybridization conditions.

[0415] Accordingly, in another embodiment, an isolated nucleic acid molecule of the invention is at least 6 nucleotides in length and hybridizes under stringent conditions to the nucleic acid molecule comprising the nucleotide sequence of SEQ ID NOS: 1, 3, 5, 7, 9, 11, 13, 15, 17, 19, 21, 23, 25, 27, 29, 31, 33, 35, 37, 39, 41, 43, 45, 47, 49, 51, 53, 55, and 57. In another embodiment, the nucleic acid is at least 10, 25, 50, 100, 250, 500, 750, 1000, 1500, or 2000 or more nucleotides in length. In yet another embodiment, an isolated nucleic acid molecule of the invention hybridizes to the coding region. As used herein, the term “hybridizes under stringent conditions” is intended to describe conditions for hybridization and washing under which nucleotide sequences at least 60% homologous to each other typically remain hybridized to each other.

[0416] Homologs (i.e., nucleic acids encoding NOVX proteins derived from species other than human) or other related sequences (e.g., paralogs) can be obtained by low, moderate or high stringency hybridization with all or a portion of the particular human sequence as a probe using methods well known in the art for nucleic acid hybridization and cloning.

[0417] As used herein, the phrase “stringent hybridization conditions” refers to conditions under which a probe, primer or oligonucleotide will hybridize to its target sequence, but to no other sequences. Stringent conditions are sequence-dependent and will be different in different circumstances. Longer sequences hybridize specifically at higher temperatures than shorter sequences. Generally, stringent conditions are selected to be about 5° C. lower than the thermal melting point (Tm) for the specific sequence at a defined ionic strength and pH. The Tm is the temperature (under defined ionic strength, pH and nucleic acid concentration) at which 50% of the probes complementary to the target sequence hybridize to the target sequence at equilibrium. Since the target sequences are generally present at excess, at Tm, 50% of the probes are occupied at equilibrium. Typically, stringent conditions will be those in which the salt concentration is less than about 1.0 M sodium ion, typically about 0.01 to 1.0 M sodium ion (or other salts) at pH 7.0 to 8.3 and the temperature is at least about 30° C. for short probes, primers or oligonucleotides (e.g., 10 nt to 50 nt) and at least about 60° C. for longer probes, primers and oligonucleotides. Stringent conditions may also be achieved with the addition of destabilizing agents, such as formamide.

[0418] Stringent conditions are known to those skilled in the art and can be found in Ausubel, et al., (eds.), Current Protocols in Molecular Biology, John Wiley & Sons, N.Y. (1989), 6.3.1-6.3.6. Preferably, the conditions are such that sequences at least about 65%, 70%, 75%, 85%, 90%, 95%, 98%, or 99% homologous to each other typically remain hybridized to each other. A non-limiting example of stringent hybridization conditions are hybridization in a high salt buffer comprising 6×SSC, 50 mM Tris-HCl (pH 7.5), 1 mM EDTA, 0.02% PVP, 0.02% Ficoll, 0.02% BSA, and 500 mg/ml denatured salmon sperm DNA at 65° C., followed by one or more washes in 0.2×SSC, 0.01% BSA at 50° C. An isolated nucleic acid molecule of the invention that hybridizes under stringent conditions to the sequences SEQ ID NOS: 1, 3, 5, 7, 9, 11, 13, 15, 17, 19, 21, 23, 25, 27, 29, 31, 33, 35, 37, 39, 41, 43, 45, 47, 49, 51, 53, 55, and 57, corresponds to a naturally-occurring nucleic acid molecule. As used herein, a “naturally-occurring” nucleic acid molecule refers to an RNA or DNA molecule having a nucleotide sequence that occurs in nature (e.g., encodes a natural protein).

[0419] In a second embodiment, a nucleic acid sequence that is hybridizable to the nucleic acid molecule comprising the nucleotide sequence of SEQ ID NOS: 1, 3, 5, 7, 9, 11, 13, 15, 17, 19, 21, 23, 25, 27, 29, 31, 33, 35, 37, 39, 41, 43, 45, 47, 49, 51, 53, 55, and 57, or fragments, analogs or derivatives thereof, under conditions of moderate stringency is provided. A non-limiting example of moderate stringency hybridization conditions are hybridization in 6×SSC, 5×Denhardt's solution, 0.5% SDS and 100 mg/ml denatured salmon sperm DNA at 55° C., followed by one or more washes in 1×SSC, 0.1% SDS at 37° C. Other conditions of moderate stringency that may be used are well-known within the art. See, e.g., Ausubel, et al. (eds.), 1993, Current Protocols in Molecular Biology, John Wiley & Sons, NY, and Kriegler, 1990; Gene Transfer and Expression, A Laboratory Manual, Stockton Press, NY.

[0420] In a third embodiment, a nucleic acid that is hybridizable to the nucleic acid molecule comprising the nucleotide sequences SEQ ID NOS: 1, 3, 5, 7, 9, 11, 13, 15, 17, 19, 21, 23, 25, 27, 29, 31, 33, 35, 37, 39, 41, 43, 45, 47, 49, 51, 53, 55, and 57, or fragments, analogs or derivatives thereof, under conditions of low stringency, is provided. A non-limiting example of low stringency hybridization conditions are hybridization in 35% formamide, 5×SSC, 50 mM Tris-HCl (pH 7.5), 5 mM EDTA, 0.02% PVP, 0.02% Ficoll, 0.2% BSA, 100 mg/ml denatured salmon sperm DNA, 10% (wt/vol) dextran sulfate at 40° C., followed by one or more washes in 2×SSC, 25 mM Tris-HCl (pH 7.4), 5 mM EDTA, and 0.1% SDS at 50° C. Other conditions of low stringency that may be used are well known in the art (e.g., as employed for cross-species hybridizations). See, e.g., Ausubel, et al. (eds.), 1993, Current Protocols in Molecular Biology, John Wiley & Sons, NY, and Kriegler, 1990, Gene Transfer and Expression, A Laboratory Manual, Stockton Press, NY; Shilo and Weinberg, 1981. Proc Natl Acad Sci USA 78: 6789-6792.

[0421] Conservative Mutations

[0422] In addition to naturally-occurring allelic variants of NOVX sequences that may exist in the population, the skilled artisan will further appreciate that changes can be introduced by mutation into the nucleotide sequences SEQ ID NOS: 1, 3, 5, 7, 9, 11, 13, 15, 17, 19, 21, 23, 25, 27, 29, 31, 33, 35, 37, 39, 41, 43, 45, 47, 49, 51, 53, 55, and 57, thereby leading to changes in the amino acid sequences of the encoded NOVX proteins, without altering the functional ability of said NOVX proteins. For example, nucleotide substitutions leading to amino acid substitutions at “non-essential” amino acid residues can be made in the sequence SEQ ID NOS: 2, 4, 6, 8, 10, 12, 14, 16, 18, 20, 22, 24, 26, 28, 30, 32, 34, 26, 28, 40, 42, 44, 46, 48, 50, 52, 54, 56, or 58. A “non-essential” amino acid residue is a residue that can be altered from the wild-type sequences of the NOVX proteins without altering their biological activity, whereas an “essential” amino acid residue is required for such biological activity. For example, amino acid residues that are conserved among the NOVX proteins of the invention are predicted to be particularly non-amenable to alteration. Amino acids for which conservative substitutions can be made are well-known within the art.

[0423] Another aspect of the invention pertains to nucleic acid molecules encoding NOVX proteins that contain changes in amino acid residues that are not essential for activity. Such NOVX proteins differ in amino acid sequence from SEQ ID NOS: 1, 3, 5, 7, 9, 11, 13, 15, 17, 19, 21, 23, 25, 27, 29, 31, 33, 35, 37, 39, 41, 43, 45, 47, 49, 51, 53, 55, and 57 yet retain biological activity. In one embodiment, the isolated nucleic acid molecule comprises a nucleotide sequence encoding a protein, wherein the protein comprises an amino acid sequence at least about 45% homologous to the amino acid sequences SEQ ID NOS: 2, 4, 6, 8, 10, 12, 14, 16, 18, 20, 22, 24, 26, 28, 30, 32, 34, 26, 28, 40, 42, 44, 46, 48, 50, 52, 54, 56, and 58. Preferably, the protein encoded by the nucleic acid molecule is at least about 60% homologous to SEQ ID NOS: 2, 4, 6, 8, 10, 12, 14, 16, 18, 20, 22, 24, 26, 28, 30, 32, 34, 26, 28, 40, 42, 44, 46, 48, 50, 52, 54, 56, and 58; more preferably at least about 70% homologous SEQ ID NOS: 2, 4, 6, 8, 10, 12, 14, 16, 18, 20, 22, 24, 26, 28, 30, 32, 34, 26, 28, 40, 42, 44, 46, 48, 50, 52, 54, 56, or 58; still more preferably at least about 80% homologous to SEQ ID NOS: 2, 4, 6, 8, 10, 12, 14, 16, 18, 20, 22, 24, 26, 28, 30, 32, 34, 26, 28, 40, 42, 44, 46, 48, 50, 52, 54, 56, or 58; even more preferably at least about 90% homologous to SEQ ID NOS: 2, 4, 6, 8, 10, 12, 14, 16, 18, 20, 22, 24, 26, 28, 30, 32, 34, 26, 28, 40, 42, 44, 46, 48, 50, 52, 54, 56, or 58; and most preferably at least about 95% homologous to SEQ ID NOS: 2, 4, 6, 8, 10, 12, 14, 16, 18, 20, 22, 24, 26, 28, 30, 32, 34, 26, 28, 40, 42, 44, 46, 48, 50, 52, 54, 56, or 58.

[0424] An isolated nucleic acid molecule encoding an NOVX protein homologous to the protein of SEQ ID NOS: 2, 4, 6, 8, 10, 12, 14, 16, 18, 20, 22, 24, 26, 28, 30, 32, 34, 26, 28, 40, 42, 44, 46, 48, 50, 52, 54, 56, or 58 can be created by introducing one or more nucleotide substitutions, additions or deletions into the nucleotide sequence of SEQ ID NOS: 1, 3, 5, 7, 9, 11, 13, 15, 17, 19, 21, 23, 25, 27, 29, 31, 33, 35, 37, 39, 41, 43, 45, 47, 49, 51, 53, 55, and 57, such that one or more amino acid substitutions, additions or deletions are introduced into the encoded protein.

[0425] Mutations can be introduced into SEQ ID NOS: 1, 3, 5, 7, 9, 11, 13, 15, 17, 19, 21, 23, 25, 27, 29, 31, 33, 35, 37, 39, 41, 43, 45, 47, 49, 51, 53, 55, and 57 by standard techniques, such as site-directed mutagenesis and PCR-mediated mutagenesis. Preferably, conservative amino acid substitutions are made at one or more predicted, non-essential amino acid residues. A “conservative amino acid substitution” is one in which the amino acid residue is replaced with an amino acid residue having a similar side chain. Families of amino acid residues having similar side chains have been defined within the art. These families include amino acids with basic side chains (e.g., lysine, arginine, histidine), acidic side chains (e.g., aspartic acid, glutamic acid), uncharged polar side chains (e.g., glycine, asparagine, glutamine, serine, threonine, tyrosine, cysteine), nonpolar side chains (e.g. alanine, valine, leucine, isoleucine, proline, phenylalanine, methionine, tryptophan), beta-branched side chains (e.g. threonine, valine, isoleucine) and aromatic side chains (e.g., tyrosine, phenylalanine, tryptophan, histidine). Thus, a predicted non-essential amino acid residue in the NOVX protein is replaced with another amino acid residue from the same side chain family. Alternatively, in another embodiment, mutations can be introduced randomly along all or part of an NOVX coding sequence, such as by saturation mutagenesis, and the resultant mutants can be screened for NOVX biological activity to identify mutants that retain activity. Following mutagenesis SEQ ID NOS: 1, 3, 5, 7, 9, 11, 13, 15, 17, 19, 21, 23, 25, 27, 29, 31, 33, 35, 37, 39, 41, 43, 45, 47, 49, 51, 53, 55, and 57, the encoded protein can be expressed by any recombinant technology known in the art and the activity of the protein can be determined.

[0426] The relatedness of amino acid families may also be determined based on side chain interactions. Substituted amino acids may be fully conserved “strong” residues or fully conserved “weak” residues. The “strong” group of conserved amino acid residues may be any one of the following groups: STA, NEQK, NHQK, NDEQ, QHRK, MILV, MILF, HY, FYW, wherein the single letter amino acid codes are grouped by those amino acids that may be substituted for each other. Likewise, the “weak” group of conserved residues may be any one of the following: CSA, ATV, SAG, STNK, STPA, SGND, SNDEQK, NDEQHK, NEQHRK, VLIM, HFY, wherein the letters within each group represent the single letter amino acid code.

[0427] In one embodiment, a mutant NOVX protein can be assayed for (i) the ability to form protein:protein interactions with other NOVX proteins, other cell-surface proteins, or biologically-active portions thereof, (ii) complex formation between a mutant NOVX protein and an NOVX ligand; or (iii) the ability of a mutant NOVX protein to bind to an intracellular target protein or biologically-active portion thereof; (e.g. avidin proteins).

[0428] In yet another embodiment, a mutant NOVX protein can be assayed for the ability to regulate a specific biological function (e.g., regulation of insulin release).

[0429] Antisense Nucleic Acids

[0430] Another aspect of the invention pertains to isolated antisense nucleic acid molecules that are hybridizable to or complementary to the nucleic acid molecule comprising the nucleotide sequence of SEQ ID NOS: 1, 3, 5, 7, 9, 11, 13, 15, 17, 19, 21, 23, 25, 27, 29, 31, 33, 35, 37, 39, 41, 43, 45, 47, 49, 51, 53, 55, and 57, or fragments, analogs or derivatives thereof. An “antisense” nucleic acid comprises a nucleotide sequence that is complementary to a “isense” nucleic acid encoding a protein (e.g., complementary to the coding strand of a double-stranded cDNA molecule or complementary to an mRNA sequence). In specific aspects, antisense nucleic acid molecules are provided that comprise a sequence complementary to at least about 10, 25, 50, 100, 250 or 500 nucleotides or an entire NOVX coding strand, or to only a portion thereof. Nucleic acid molecules encoding fragments, homologs, derivatives and analogs of an NOVX protein of SEQ ID NOS: 2, 4, 6, 8, 10, 12, 14, 16, 18, 20, 22, 24, 26, 28, 30, 32, 34, 26, 28, 40, 42, 44, 46, 48, 50, 52, 54, 56, or 58, or antisense nucleic acids complementary to an NOVX nucleic acid sequence of SEQ ID NOS: 1, 3, 5, 7, 9, 11, 13, 15, 17, 19, 21, 23, 25, 27, 29, 31, 33, 35, 37, 39, 41, 43, 45, 47, 49, 51, 53, 55, and 57, are additionally provided.

[0431] In one embodiment, an antisense nucleic acid molecule is antisense to a “coding region” of the coding strand of a nucleotide sequence encoding an NOVX protein. The term “coding region” refers to the region of the nucleotide sequence comprising codons which are translated into amino acid residues. In another embodiment, the antisense nucleic acid molecule is antisense to a “noncoding region” of the coding strand of a nucleotide sequence encoding the NOVX protein. The term “noncoding region” refers to 5′ and 3′ sequences which flank the coding region that are not translated into amino acids (i.e., also referred to as 5′ and 3′ untranslated regions).

[0432] Given the coding strand sequences encoding the NOVX protein disclosed herein, antisense nucleic acids of the invention can be designed according to the rules of Watson and Crick or Hoogsteen base pairing. The antisense nucleic acid molecule can be complementary to the entire coding region of NOVX mRNA, but more preferably is an oligonucleotide that is antisense to only a portion of the coding or noncoding region of NOVX mRNA. For example, the antisense oligonucleotide can be complementary to the region surrounding the translation start site of NOVX mRNA. An antisense oligonucleotide can be, for example, about 5, 10, 15, 20, 25, 30, 35, 40, 45 or 50 nucleotides in length. An antisense nucleic acid of the invention can be constructed using chemical synthesis or enzymatic ligation reactions using procedures known in the art. For example, an antisense nucleic acid (e.g., an antisense oligonucleotide) can be chemically synthesized using naturally-occurring nucleotides or variously modified nucleotides designed to increase the biological stability of the molecules or to increase the physical stability of the duplex formed between the antisense and sense nucleic acids (e.g., phosphorothioate derivatives and acridine substituted nucleotides can be used).

[0433] Examples of modified nucleotides that can be used to generate the antisense nucleic acid include: 5-fluorouracil, 5-bromouracil, 5-chlorouracil, 5-iodouracil, hypoxanthine, xanthine, 4-acetylcytosine, 5-(carboxyhydroxylmethyl) uracil, 5-carboxymethylaminomethyl-2-thiouridine, 5-carboxymethylaminomethyluracil, dihydrouracil, beta-D-galactosylqueosine, inosine, N6-isopentenyladenine, 1-methylguanine, 1-methylinosine, 2, 2-dimethylguanine, 2-methyladenine, 2-methylguanine, 3-methylcytosine, 5-methylcytosine, N6-adenine, 7-methylguanine, 5-methylaminomethyluracil, 5-methoxyaminomethyl-2-thiouracil, beta-D-mannosylqueosine, 5′-methoxycarboxymethyluracil, 5-methoxyuracil, 2-methylthio-N6-isopentenyladenine, uracil-5-oxyacetic acid (v), wybutoxosine, pseudouracil, queosine, 2-thiocytosine, 5-methyl-2-thiouracil, 2-thiouracil, 4-thiouracil, 5-methyluracil, uracil-5-oxyacetic acid methylester, uracil-5-oxyacetic acid (v), 5-methyl-2-thiouracil, 3-(3-amino-3-N-2-carboxypropyl) uracil, (acp3)w, and 2,6-diaminopurine. Alternatively, the antisense nucleic acid can be produced biologically using an expression vector into which a nucleic acid has been subcloned in an antisense orientation (ie., RNA transcribed from the inserted nucleic acid will be of an antisense orientation to a target nucleic acid of interest, described further in the following subsection).

[0434] The antisense nucleic acid molecules of the invention are typically administered to a subject or generated in situ such that they hybridize with or bind to cellular mRNA and/or genomic DNA encoding an NOVX protein to thereby inhibit expression of the protein (e.g., by inhibiting transcription and/or translation). The hybridization can be by conventional nucleotide complementarity to form a stable duplex, or, for example, in the case of an antisense nucleic acid molecule that binds to DNA duplexes, through specific interactions in the major groove of the double helix. An example of a route of administration of antisense nucleic acid molecules of the invention includes direct injection at a tissue site. Alternatively, antisense nucleic acid molecules can be modified to target selected cells and then administered systemically. For example, for systemic administration, antisense molecules can be modified such that they specifically bind to receptors or antigens expressed on a selected cell surface (e.g., by linking the antisense nucleic acid molecules to peptides or antibodies that bind to cell surface receptors or antigens). The antisense nucleic acid molecules can also be delivered to cells using the vectors described herein. To achieve sufficient nucleic acid molecules, vector constructs in which the antisense nucleic acid molecule is placed under the control of a strong pol II or pol III promoter are preferred.

[0435] In yet another embodiment, the antisense nucleic acid molecule of the invention is an α-anomeric nucleic acid molecule. An α-anomeric nucleic acid molecule forms specific double-stranded hybrids with complementary RNA in which, contrary to the usual β-units, the strands run parallel to each other. See, e.g., Gaultier, et al., 1987. Nucl. Acids Res. 15: 6625-6641. The antisense nucleic acid molecule can also comprise a 2′-o-methylribonucleotide (See, e.g., Inoue, et al. 1987. Nucl. Acids Res. 15: 6131-6148) or a chimeric RNA-DNA analogue (See, e.g., Inoue, et al., 1987. FEBS Lett. 215: 327-330.

[0436] Ribozymes and PNA Moieties

[0437] Nucleic acid modifications include, by way of non-limiting example, modified bases, and nucleic acids whose sugar phosphate backbones are modified or derivatized. These modifications are carried out at least in part to enhance the chemical stability of the modified nucleic acid, such that they may be used, for example, as antisense binding nucleic acids in therapeutic applications in a subject.

[0438] In one embodiment, an antisense nucleic acid of the invention is a ribozyme. Ribozymes are catalytic RNA molecules with ribonuclease activity that are capable of cleaving a single-stranded nucleic acid, such as an mRNA, to which they have a complementary region. Thus, ribozymes (e.g., hammerhead ribozymes as described in Haselhoff and Gerlach 1988. Nature 334: 585-591) can be used to catalytically cleave NOVX mRNA transcripts to thereby inhibit translation of NOVX mRNA. A ribozyme having specificity for an NOVX-encoding nucleic acid can be designed based upon the nucleotide sequence of an NOVX cDNA disclosed herein (i.e., SEQ ID NOS: 1, 3, 5, 7, 9, 11, 13, 15, 17, 19, 21, 23, 25, 27, 29, 31, 33, 35, 37, 39, 41, 43, 45, 47, 49, 51, 53, 55, and 57). For example, a derivative of a Tetrahymena L-19 IVS RNA can be constructed in which the nucleotide sequence of the active site is complementary to the nucleotide sequence to be cleaved in an NOVX-encoding mRNA. See, e.g., U.S. Pat. No. 4,987,071 to Cech, et al. and U.S. Pat. No. 5,116,742 to Cech, et al. NOVX mRNA can also be used to select a catalytic RNA having a specific ribonuclease activity from a pool of RNA molecules. See, e.g., Bartel et al., (1993) Science 261:1411-1418.

[0439] Alternatively, NOVX gene expression can be inhibited by targeting nucleotide sequences complementary to the regulatory region of the NOVX nucleic acid (e.g., the NOVX promoter and/or enhancers) to form triple helical structures that prevent transcription of the NOVX gene in target cells. See, e.g., Helene, 1991. Anticancer Drug Des. 6: 569-84; Helene, et al. 1992. Ann. N.Y Acad. Sci. 660: 27-36; Maher, 1992. Bioassays 14: 807-15.

[0440] In various embodiments, the NOVX nucleic acids can be modified at the base moiety, sugar moiety or phosphate backbone to improve, e.g., the stability, hybridization, or solubility of the molecule. For example, the deoxyribose phosphate backbone of the nucleic acids can be modified to generate peptide nucleic acids. See, e.g., Hyrup, et al., 1996. Bioorg Med Chem 4: 5-23. As used herein, the terms “peptide nucleic acids” or “PNAs” refer to nucleic acid mimics (e.g., DNA mimics) in which the deoxyribose phosphate backbone is replaced by a pseudopeptide backbone and only the four natural nucleobases are retained. The neutral backbone of PNAs has been shown to allow for specific hybridization to DNA and RNA under conditions of low ionic strength. The synthesis of PNA oligomers can be performed using standard solid phase peptide synthesis protocols as described in Hyrup, et al., 1996. supra; Perry-O'Keefe, et al., 1996. Proc. Natl. Acad. Sci. USA 93: 14670-14675.

[0441] PNAs of NOVX can be used in therapeutic and diagnostic applications. For example, PNAs can be used as antisense or antigene agents for sequence-specific modulation of gene expression by, e.g., inducing transcription or translation arrest or inhibiting replication. PNAs of NOVX can also be used, for example, in the analysis of single base pair mutations in a gene (e.g., PNA directed PCR clamping; as artificial restriction enzymes when used in combination with other enzymes, e.g., S₁ nucleases (See, Hyrup, et al., 1996. supra); or as probes or primers for DNA sequence and hybridization (See, Hyrup, et al., 1996, supra; Perry-O'Keefe, et al., 1996. supra).

[0442] In another embodiment, PNAs of NOVX can be modified, e.g., to enhance their stability or cellular uptake, by attaching lipophilic or other helper groups to PNA, by the formation of PNA-DNA chimeras, or by the use of liposomes or other techniques of drug delivery known in the art. For example, PNA-DNA chimeras of NOVX can be generated that may combine the advantageous properties of PNA and DNA. Such chimeras allow DNA recognition enzymes (e.g., RNase H and DNA polymerases) to interact with the DNA portion while the PNA portion would provide high binding affinity and specificity. PNA-DNA chimeras can be linked using linkers of appropriate lengths selected in terms of base stacking, number of bonds between the nucleobases, and orientation (see, Hyrup, et al., 1996. supra). The synthesis of PNA-DNA chimeras can be performed as described in Hyrup, et al., 1996. supra and Finn, et al., 1996. Nucl Acids Res 24: 3357-3363. For example, a DNA chain can be synthesized on a solid support using standard phosphoramidite coupling chemistry, and modified nucleoside analogs, e.g., 5′-(4-methoxytrityl)amino-5′-deoxy-thymidine phosphoramidite, can be used between the PNA and the 5′ end of DNA. See, e.g., Mag, et al., 1989. Nucl Acid Res 17: 5973-5988. PNA monomers are then coupled in a stepwise manner to produce a chimeric molecule with a 5′ PNA segment and a 3′ DNA segment. See, e.g., Finn, et al., 1996. supra. Alternatively, chimeric molecules can be synthesized with a 5′ DNA segment and a 3′ PNA segment. See, e.g., Petersen, et al., 1975. Bioorg. Med. Chem. Lett. 5: 1119-11124.

[0443] In other embodiments, the oligonucleotide may include other appended groups such as peptides (e.g., for targeting host cell receptors in vivo), or agents facilitating transport across the cell membrane (see, e.g., Letsinger, et al., 1989. Proc. Natl. Acad. Sci. U.S.A. 86: 6553-6556; Lemaitre, et al., 1987. Proc. Natl. Acad. Sci. 84: 648-652; PCT Publication No. WO88/09810) or the blood-brain barrier (see, e.g., PCT Publication No. WO 89/10134). In addition, oligonucleotides can be modified with hybridization triggered cleavage agents (see, e.g., Krol, et al., 1988. BioTechniques 6:958-976) or intercalating agents (see, e.g. Zon, 1988. Pharm. Res. 5: 539-549). To this end, the oligonucleotide may be conjugated to another molecule, e.g., a peptide, a hybridization triggered cross-linking agent, a transport agent, a hybridization-triggered cleavage agent, and the like.

[0444] NOVX Polypeptides

[0445] A polypeptide according to the invention includes a polypeptide including the amino acid sequence of NOVX polypeptides whose sequences are provided in SEQ ID NOS: 2, 4, 6, 8, 10, 12, 14, 16, 18, 20, 22, 24, 26, 28, 30, 32, 34, 26, 28, 40, 42, 44, 46, 48, 50, 52, 54, 56, or 58. The invention also includes a mutant or variant protein any of whose residues may be changed from the corresponding residues shown in SEQ ID NOS: 2, 4, 6, 8, 10, 12, 14, 16, 18, 20, 22, 24, 26, 28, 30, 32, 34, 26, 28, 40, 42, 44, 46, 48, 50, 52, 54, 56, or 58 while still encoding a protein that maintains its NOVX activities and physiological functions, or a functional fragment thereof.

[0446] In general, an NOVX variant that preserves NOVX-like function includes any variant in which residues at a particular position in the sequence have been substituted by other amino acids, and further include the possibility of inserting an additional residue or residues between two residues of the parent protein as well as the possibility of deleting one or more residues from the parent sequence. Any amino acid substitution, insertion, or deletion is encompassed by the invention. In favorable circumstances, the substitution is a conservative substitution as defined above.

[0447] One aspect of the invention pertains to isolated NOVX proteins, and biologically-active portions thereof, or derivatives, fragments, analogs or homologs thereof. Also provided are polypeptide fragments suitable for use as immunogens to raise anti-NOVX antibodies. In one embodiment, native NOVX proteins can be isolated from cells or tissue sources by an appropriate purification scheme using standard protein purification techniques. In another embodiment, NOVX proteins are produced by recombinant DNA techniques. Alternative to recombinant expression, an NOVX protein or polypeptide can be synthesized chemically using standard peptide synthesis techniques.

[0448] An “isolated” or “purified” polypeptide or protein or biologically-active portion thereof is substantially free of cellular material or other contaminating proteins from the cell or tissue source from which the NOVX protein is derived, or substantially free from chemical precursors or other chemicals when chemically synthesized. The language “substantially free of cellular material” includes preparations of NOVX proteins in which the protein is separated from cellular components of the cells from which it is isolated or recombinantly-produced. In one embodiment, the language “substantially free of cellular material” includes preparations of NOVX proteins having less than about 30% (by dry weight) of non-NOVX proteins (also referred to herein as a “contaminating protein”), more preferably less than about 20% of non-NOVX proteins, still more preferably less than about 10% of non-NOVX proteins, and most preferably less than about 5% of non-NOVX proteins. When the NOVX protein or biologically-active portion thereof is recombinantly-produced, it is also preferably substantially free of culture medium, i.e., culture medium represents less than about 20%, more preferably less than about 10%, and most preferably less than about 5% of the volume of the NOVX protein preparation.

[0449] The language “substantially free of chemical precursors or other chemicals” includes preparations of NOVX proteins in which the protein is separated from chemical precursors or other chemicals that are involved in the synthesis of the protein. In one embodiment, the language “substantially free of chemical precursors or other chemicals” includes preparations of NOVX proteins having less than about 30% (by dry weight) of chemical precursors or non-NOVX chemicals, more preferably less than about 20% chemical precursors or non-NOVX chemicals, still more preferably less than about 10% chemical precursors or non-NOVX chemicals, and most preferably less than about 5% chemical precursors or non-NOVX chemicals.

[0450] Biologically-active portions of NOVX proteins include peptides comprising amino acid sequences sufficiently homologous to or derived from the amino acid sequences of the NOVX proteins (e.g., the amino acid sequence shown in SEQ ID NOS: 2, 4, 6, 8, 10, 12, 14, 30 16, 18, 20, 22, 24, 26, 28, 30, 32, 34, 26, 28, 40, 42, 44, 46, 48, 50, 52, 54, 56, or 58) that include fewer amino acids than the full-length NOVX proteins, and exhibit at least one activity of an NOVX protein. Typically, biologically-active portions comprise a domain or motif with at least one activity of the NOVX protein. A biologically-active portion of an NOVX protein can be a polypeptide which is, for example, 10, 25, 50, 100 or more amino acid residues in length.

[0451] Moreover, other biologically-active portions, in which other regions of the protein are deleted, can be prepared by recombinant techniques and evaluated for one or more of the functional activities of a native NOVX protein.

[0452] In an embodiment, the NOVX protein has an amino acid sequence shown SEQ ID NOS: 2, 4, 6, 8, 10, 12, 14, 16, 18, 20, 22, 24, 26, 28, 30, 32, 34, 26, 28, 40, 42, 44, 46, 48, 50, 52, 54, 56, or 58. In other embodiments, the NOVX protein is substantially homologous to SEQ ID NOS: 2, 4, 6, 8, 10, 12, 14, 16, 18, 20, 22, 24, 26, 28, 30, 32, 34, 26, 28, 40, 42, 44, 46, 48, 50, 52, 54, 56, or 58, and retains the functional activity of the protein of SEQ ID NOS: 2, 4, 6, 8, 10, 12, 14, 16, 18, 20, 22, 24, 26, 28, 30, 32, 34, 26, 28, 40, 42, 44, 46, 48, 50, 52, 54, 56, or 58, yet differs in amino acid sequence due to natural allelic variation or mutagenesis, as described in detail, below. Accordingly, in another embodiment, the NOVX protein is a protein that comprises an amino acid sequence at least about 45% homologous to the amino acid sequence SEQ ID NOS: 2, 4, 6, 8, 10, 12, 14, 16, 18, 20, 22, 24, 26, 28, 30, 32, 34, 26, 28, 40, 42, 44, 46, 48, 50, 52, 54, 56, or 58, and retains the functional activity of the NOVX proteins of SEQ ID NOS: 2, 4, 6, 8, 10, 12, 14, 16, 18, 20, 22, 24, 26, 28, 30, 32, 34, 26, 28, 40, 42, 44, 46, 48, 50, 52, 54, 56, or 58.

[0453] Determining Homology Between Two or More Sequences

[0454] To determine the percent homology of two amino acid sequences or of two nucleic acids, the sequences are aligned for optimal comparison purposes (e.g., gaps can be introduced in the sequence of a first amino acid or nucleic acid sequence for optimal alignment with a second amino or nucleic acid sequence). The amino acid residues or nucleotides at corresponding amino acid positions or nucleotide positions are then compared. When a position in the first sequence is occupied by the same amino acid residue or nucleotide as the corresponding position in the second sequence, then the molecules are homologous at that position (i.e., as used herein amino acid or nucleic acid “homology” is equivalent to amino acid or nucleic acid “identity”).

[0455] The nucleic acid sequence homology may be determined as the degree of identity between two sequences. The homology may be determined using computer programs known in the art, such as GAP software provided in the GCG program package. See, Needleman and Wunsch, 1970. J. Mol Biol 48: 443453. Using GCG GAP software with the following settings for nucleic acid sequence comparison: GAP creation penalty of 5.0 and GAP extension penalty of 0.3, the coding region of the analogous nucleic acid sequences referred to above exhibits a degree of identity preferably of at least 70%, 75%, 80%, 85%, 90%, 95%, 98%, or 99%, with the CDS (encoding) part of the DNA sequence shown in SEQ ID NOS: 1, 3, 5, 7, 9, 11, 13, 15, 17, 19, 21, 23, 25, 27, 29, 31, 33, 35, 37, 39, 41, 43, 45, 47, 49, 51, 53, 55, and 57.

[0456] The term “sequence identity” refers to the degree to which two polynucleotide or polypeptide sequences are identical on a residue-by-residue basis over a particular region of comparison. The term “percentage of sequence identity” is calculated by comparing two optimally aligned sequences over that region of comparison, determining the number of positions at which the identical nucleic acid base (e.g. A, T, C, G, U, or I, in the case of nucleic acids) occurs in both sequences to yield the number of matched positions, dividing the number of matched positions by the total number of positions in the region of comparison (i e., the window size), and multiplying the result by 100 to yield the percentage of sequence identity. The term “substantial identity” as used herein denotes a characteristic of a polynucleotide sequence, wherein the polynucleotide comprises a sequence that has at least 80 percent sequence identity, preferably at least 85 percent identity and often 90 to 95 percent sequence identity, more usually at least 99 percent sequence identity as compared to a reference sequence over a comparison region.

[0457] Chimeric and Fusion Proteins

[0458] The invention also provides NOVX chimeric or fusion proteins. As used herein, an NOVX “chimeric protein” or “fusion protein” comprises an NOVX polypeptide operatively-linked to a non-NOVX polypeptide. An “NOVX polypeptide” refers to a polypeptide having an amino acid sequence corresponding to an NOVX protein SEQ ID NOS: 2, 4, 6, 8, 10, 12, 14, 16, 18, 20, 22, 24, 26, 28, 30, 32, 34, 26, 28, 40, 42, 44, 46, 48, 50, 52, 54, 56, or 58, whereas a “non-NOVX polypeptide” refers to a polypeptide having an amino acid sequence corresponding to a protein that is not substantially homologous to the NOVX protein, e.g. a protein that is different from the NOVX protein and that is derived from the same or a different organism. Within an NOVX fusion protein the NOVX polypeptide can correspond to all or a portion of an NOVX protein. In one embodiment, an NOVX fusion protein comprises at least one biologically-active portion of an NOVX protein. In another embodiment, an NOVX fusion protein comprises at least two biologically-active portions of an NOVX protein. In yet another embodiment, an NOVX fusion protein comprises at least three biologically-active portions of an NOVX protein. Within the fusion protein, the term “operatively-linked” is intended to indicate that the NOVX polypeptide and the non-NOVX polypeptide are fused in-frame with one another. The non-NOVX polypeptide can be fused to the N-terminus or C-terminus of the NOVX polypeptide.

[0459] In one embodiment, the fusion protein is a GST-NOVX fusion protein in which the NOVX sequences are fused to the C-terminus of the GST (glutathione S-transferase) sequences. Such fusion proteins can facilitate the purification of recombinant NOVX polypeptides.

[0460] In another embodiment, the fusion protein is an NOVX protein containing a heterologous signal sequence at its N-terminus. In certain host cells (e.g. mammalian host cells), expression and/or secretion of NOVX can be increased through use of a heterologous signal sequence.

[0461] In yet another embodiment, the fusion protein is an NOVX-immunoglobulin fusion protein in which the NOVX sequences are fused to sequences derived from a member of the immunoglobulin protein family. The NOVX-immunoglobulin fusion proteins of the invention can be incorporated into pharmaceutical compositions and administered to a subject to inhibit an interaction between an NOVX ligand and an NOVX protein on the surface of a cell, to thereby suppress NOVX-mediated signal transduction in vivo. The NOVX-immunoglobulin fusion proteins can be used to affect the bioavailability of an NOVX cognate ligand. Inhibition of the NOVX ligand/NOVX interaction may be useful therapeutically for both the treatment of proliferative and differentiative disorders, as well as modulating (e.g. promoting or inhibiting) cell survival. Moreover, the NOVX-immunoglobulin fusion proteins of the invention can be used as immunogens to produce anti-NOVX antibodies in a subject, to purify NOVX ligands, and in screening assays to identify molecules that inhibit the interaction of NOVX with an NOVX ligand.

[0462] An NOVX chimeric or fusion protein of the invention can be produced by standard recombinant DNA techniques. For example, DNA fragments coding for the different polypeptide sequences are ligated together in-frame in accordance with conventional techniques, e.g., by employing blunt-ended or stagger-ended termini for ligation, restriction enzyme digestion to provide for appropriate termini, filling-in of cohesive ends as appropriate, alkaline phosphatase treatment to avoid undesirable joining, and enzymatic ligation. In another embodiment, the fusion gene can be synthesized by conventional techniques including automated DNA synthesizers. Alternatively, PCR amplification of gene fragments can be carried out using anchor primers that give rise to complementary overhangs between two consecutive gene fragments that can subsequently be annealed and reamplified to generate a chimeric gene sequence (see, e.g., Ausubel, et al. (eds.) Current Protocols in Molecular Biology, John Wiley & Sons, 1992). Moreover, many expression vectors are commercially available that already encode a fusion moiety (e.g., a GST polypeptide). An NOVX-encoding nucleic acid can be cloned into such an expression vector such that the fusion moiety is linked in-frame to the NOVX protein.

[0463] NOVX Agonists and Antagonists

[0464] The invention also pertains to variants of the NOVX proteins that function as either NOVX agonists (i.e., mimetics) or as NOVX antagonists. Variants of the NOVX protein can be generated by mutagenesis (e.g., discrete point mutation or truncation of the NOVX protein). An agonist of the NOVX protein can retain substantially the same, or a subset of, the biological activities of the naturally occurring form of the NOVX protein. An antagonist of the NOVX protein can inhibit one or more of the activities of the naturally occurring form of the NOVX protein by, for example, competitively binding to a downstream or upstream member of a cellular signaling cascade which includes the NOVX protein. Thus, specific biological effects can be elicited by treatment with a variant of limited function. In one embodiment, treatment of a subject with a variant having a subset of the biological activities of the naturally occurring form of the protein has fewer side effects in a subject relative to treatment with the naturally occurring form of the NOVX proteins.

[0465] Variants of the NOVX proteins that function as either NOVX agonists (i.e., mimetics) or as NOVX antagonists can be identified by screening combinatorial libraries of mutants (e.g., truncation mutants) of the NOVX proteins for NOVX protein agonist or antagonist activity. In one embodiment, a variegated library of NOVX variants is generated by combinatorial mutagenesis at the nucleic acid level and is encoded by a variegated gene library. A variegated library of NOVX variants can be produced by, for example, enzymatically ligating a mixture of synthetic oligonucleotides into gene sequences such that a degenerate set of potential NOVX sequences is expressible as individual polypeptides, or alternatively, as a set of larger fusion proteins (e.g., for phage display) containing the set of NOVX sequences therein. There are a variety of methods which can be used to produce libraries of potential NOVX variants from a degenerate oligonucleotide sequence. Chemical synthesis of a degenerate gene sequence can be performed in an automatic DNA synthesizer, and the synthetic gene then ligated into an appropriate expression vector. Use of a degenerate set of genes allows for the provision, in one mixture, of all of the sequences encoding the desired set of potential NOVX sequences. Methods for synthesizing degenerate oligonucleotides are well-known within the art. See, e.g., Narang, 1983. Tetrahedron 39: 3; Itakura, et al., 1984. Annu. Rev. Biochem. 53: 323; Itakura, et al., 1984. Science 198: 1056; Ike, et al., 1983. Nucl. Acids Res. 11: 477.

[0466] Polypeptide Libraries

[0467] In addition, libraries of fragments of the NOVX protein coding sequences can be used to generate a variegated population of NOVX fragments for screening and subsequent selection of variants of an NOVX protein. In one embodiment, a library of coding sequence fragments can be generated by treating a double stranded PCR fragment of an NOVX coding sequence with a nuclease under conditions wherein nicking occurs only about once per molecule, denaturing the double stranded DNA, renaturing the DNA to form double-stranded DNA that can include sense/antisense pairs from different nicked products, removing single stranded portions from reformed duplexes by treatment with S₁ nuclease, and ligating the resulting fragment library into an expression vector. By this method, expression libraries can be derived which encodes N-terminal and internal fragments of various sizes of the NOVX proteins.

[0468] Various techniques are known in the art for screening gene products of combinatorial libraries made by point mutations or truncation, and for screening cDNA libraries for gene products having a selected property. Such techniques are adaptable for rapid screening of the gene libraries generated by the combinatorial mutagenesis of NOVX proteins. The most widely used techniques, which are amenable to high throughput analysis, for screening large gene libraries typically include cloning the gene library into replicable expression vectors, transforming appropriate cells with the resulting library of vectors, and expressing the combinatorial genes under conditions in which detection of a desired activity facilitates isolation of the vector encoding the gene whose product was detected. Recursive ensemble mutagenesis (REM), a new technique that enhances the frequency of functional mutants in the libraries, can be used in combination with the screening assays to identify NOVX variants. See, e.g., Arkin and Yourvan, 1992. Proc. Natl. Acad. Sci. USA 89: 7811-7815; Delgrave, et al., 1993. Protein Engineering 6:327-331.

[0469] Anti-NOVX Antibodies

[0470] Also included in the invention are antibodies to NOVX proteins, or fragments of NOVX proteins. The term “antibody” as used herein refers to immunoglobulin molecules and immunologically active portions of immunoglobulin (Ig) molecules, i.e., molecules that contain an antigen binding site that specifically binds (immunoreacts with) an antigen. Such antibodies include, but are not limited to, polyclonal, monoclonal, chimeric, single chain, F_{ab}, F_{ab′} and F_{(ab′)2}, fragments, and an F_{ab} expression library. In general, an antibody molecule obtained from humans relates to any of the classes IgG, IgM, IgA, IgE and IgD, which differ from one another by the nature of the heavy chain present in the molecule. Certain classes have subclasses as well, such as IgG₁, IgG₂, and others. Furthermore, in humans, the light chain may be a kappa chain or a lambda chain. Reference herein to antibodies includes a reference to all such classes, subclasses and types of human antibody species.

[0471] An isolated NOVX-related protein of the invention may be intended to serve as an antigen, or a portion or fragment thereof, and additionally can be used as an immunogen to generate antibodies that immunospecifically bind the antigen, using standard techniques for polyclonal and monoclonal antibody preparation. The full-length protein can be used or, alternatively, the invention provides antigenic peptide fragments of the antigen for use as immunogens. An antigenic peptide fragment comprises at least 6 amino acid residues of the amino acid sequence of the full length protein and encompasses an epitope thereof such that an antibody raised against the peptide forms a specific immune complex with the full length protein or with any fragment that contains the epitope. Preferably, the antigenic peptide comprises at least 10 amino acid residues, or at least 15 amino acid residues, or at least 20 amino acid residues, or at least 30 amino acid residues. Preferred epitopes encompassed by the antigenic peptide are regions of the protein that are located on its surface; commonly these are hydrophilic regions.

[0472] In certain embodiments of the invention, at least one epitope encompassed by the antigenic peptide is a region of NOVX-related protein that is located on the surface of the protein, e.g., a hydrophilic region. A hydrophobicity analysis of the human NOVX-related protein sequence will indicate which regions of a NOVX-related protein are particularly hydrophilic and, therefore, are likely to encode surface residues useful for targeting antibody production. As a means for targeting antibody production, hydropathy plots showing regions of hydrophilicity and hydrophobicity may be generated by any method well known in the art, including, for example, the Kyte Doolittle or the Hopp Woods methods, either with or without Fourier transformation. See, e.g., Hopp and Woods, 1981, Proc. Nat. Acad. Sci. USA 78: 3824-3828; Kyte and Doolittle 1982, J. Mol. Biol. 157: 105-142, each of which is incorporated herein by reference in its entirety. Antibodies that are specific for one or more domains within an antigenic protein, or derivatives, fragments, analogs or homologs thereof, are also provided herein.

[0473] A protein of the invention, or a derivative, fragment, analog, homolog or ortholog thereof, may be utilized as an immunogen in the generation of antibodies that immunospecifically bind these protein components.

[0474] Various procedures known within the art may be used for the production of polyclonal or monoclonal antibodies directed against a protein of the invention, or against derivatives, fragments, analogs homologs or orthologs thereof (see, for example, Antibodies: A Laboratory Manual, Harlow and Lane, 1988, Cold Spring Harbor Laboratory Press, Cold Spring Harbor, N.Y., incorporated herein by reference). Some of these antibodies are discussed below.

[0475] Polyclonal Antibodies

[0476] For the production of polyclonal antibodies, various suitable host animals (e.g., rabbit, goat, mouse or other mammal) may be immunized by one or more injections with the native protein, a synthetic variant thereof, or a derivative of the foregoing. An appropriate immunogenic preparation can contain, for example, the naturally occurring immunogenic protein, a chemically synthesized polypeptide representing the immunogenic protein, or a recombinantly expressed immunogenic protein. Furthermore, the protein may be conjugated to a second protein known to be immunogenic in the mammal being immunized. Examples of such immunogenic proteins include but are not limited to keyhole limpet hemocyanin, serum albumin, bovine thyroglobulin, and soybean trypsin inhibitor. The preparation can further include an adjuvant. Various adjuvants used to increase the immunological response include, but are not limited to, Freund's (complete and incomplete), mineral gels (e.g., aluminum hydroxide), surface active substances (e.g., lysolecithin, pluronic polyols, polyanions, peptides, oil emulsions, dinitrophenol, etc.), adjuvants usable in humans such as Bacille Calmette-Guerin and Corynebacterium parvum, or similar immunostimulatory agents. Additional examples of adjuvants which can be employed include MPL-TDM adjuvant (monophosphoryl Lipid A, synthetic trehalose dicorynomycolate).

[0477] The polyclonal antibody molecules directed against the immunogenic protein can be isolated from the mammal (e.g., from the blood) and further purified by well known techniques, such as affinity chromatography using protein A or protein G, which provide primarily the IgG fraction of immune serum. Subsequently, or alternatively, the specific antigen which is the target of the immunoglobulin sought, or an epitope thereof, may be immobilized on a column to purify the immune specific antibody by immunoaffinity chromatography. Purification of immunoglobulins is discussed, for example, by D. Wilkinson (The Scientist, published by The Scientist, Inc., Philadelphia Pa., Vol. 14, No. 8 (Apr. 17, 2000), pp. 25-28).

[0478] Monoclonal Antibodies

[0479] The term “monoclonal antibody” (MAb) or “monoclonal antibody composition”, as used herein, refers to a population of antibody molecules that contain only one molecular species of antibody molecule consisting of a unique light chain gene product and a unique heavy chain gene product. In particular, the complementarity determining regions (CDRs) of the monoclonal antibody are identical in all the molecules of the population. MAbs thus contain an antigen binding site capable of immunoreacting with a particular epitope of the antigen characterized by a unique binding affinity for it.

[0480] Monoclonal antibodies can be prepared using hybridoma methods, such as those described by Kohler and Milstein, Nature, 256:495 (1975). In a hybridoma method, a mouse, hamster, or other appropriate host animal, is typically immunized with an immunizing agent to elicit lymphocytes that produce or are capable of producing antibodies that will specifically bind to the immunizing agent. Alternatively, the lymphocytes can be immunized in vitro.

[0481] The immunizing agent will typically include the protein antigen, a fragment thereof or a fusion protein thereof. Generally, either peripheral blood lymphocytes are used if cells of human origin are desired, or spleen cells or lymph node cells are used if non-human mammalian sources are desired. The lymphocytes are then fused with an immortalized cell line using a suitable fusing agent, such as polyethylene glycol, to form a hybridoma cell (Goding, Monoclonal Antibodies: Principles and Practice, Academic Press, (1986) pp. 59-103). Immortalized cell lines are usually transformed mammalian cells, particularly myeloma cells of rodent, bovine and human origin. Usually, rat or mouse myeloma cell lines are employed. The hybridoma cells can be cultured in a suitable culture medium that preferably contains one or more substances that inhibit the growth or survival of the unfused, immortalized cells. For example, if the parental cells lack the enzyme hypoxanthine guanine phosphoribosyl transferase (HGPRT or HPRT), the culture medium for the hybridomas typically will include hypoxanthine, aminopterin, and thymidine (“HAT medium”), which substances prevent the growth of HGPRT-deficient cells.

[0482] Preferred immortalized cell lines are those that fuse efficiently, support stable high level expression of antibody by the selected antibody-producing cells, and are sensitive to a medium such as HAT medium. More preferred immortalized cell lines are murine myeloma lines, which can be obtained, for instance, from the Salk Institute Cell Distribution Center, San Diego, Calif. and the American Type Culture Collection, Manassas, Va. Human myeloma and mouse-human heteromyeloma cell lines also have been described for the production of human monoclonal antibodies (Kozbor, J. Immunol., 133:3001 (1984); Brodeur et al., Monoclonal Antibody Production Techniques and Applications, Marcel Dekker, Inc., New York, (1987) pp. 51-63).

[0483] The culture medium in which the hybridoma cells are cultured can then be assayed for the presence of monoclonal antibodies directed against the antigen. Preferably, the binding specificity of monoclonal antibodies produced by the hybridoma cells is determined by immunoprecipitation or by an in vitro binding assay, such as radioimmunoassay (RIA) or enzyme-linked immunoabsorbent assay (ELISA). Such techniques and assays are known in the art. The binding affinity of the monoclonal antibody can, for example, be determined by the Scatchard analysis of Munson and Pollard, Anal. Biochem., 107:220 (1980). Preferably, antibodies having a high degree of specificity and a high binding affinity for the target antigen are isolated.

[0484] After the desired hybridoma cells are identified, the clones can be subcloned by limiting dilution procedures and grown by standard methods. Suitable culture media for this purpose include, for example, Dulbecco's Modified Eagle's Medium and RPMI-1640 medium. Alternatively, the hybridoma cells can be grown in vivo as ascites in a mammal.

[0485] The monoclonal antibodies secreted by the subclones can be isolated or purified from the culture medium or ascites fluid by conventional immunoglobulin purification procedures such as, for example, protein A-Sepharose, hydroxylapatite chromatography, gel electrophoresis, dialysis, or affinity chromatography.

[0486] The monoclonal antibodies can also be made by recombinant DNA methods, such as those described in U.S. Pat. No. 4,816,567. DNA encoding the monoclonal antibodies of the invention can be readily isolated and sequenced using conventional procedures (e.g., by using oligonucleotide probes that are capable of binding specifically to genes encoding the heavy and light chains of murine antibodies). The hybridoma cells of the invention serve as a preferred source of such DNA. Once isolated, the DNA can be placed into expression vectors, which are then transfected into host cells such as simian COS cells, Chinese hamster ovary (CHO) cells, or myeloma cells that do not otherwise produce immunoglobulin protein, to obtain the synthesis of monoclonal antibodies in the recombinant host cells. The DNA also can be modified, for example, by substituting the coding sequence for human heavy and light chain constant domains in place of the homologous murine sequences (U.S. Pat. No. 4,816,567; Morrison, Nature 368, 812-13 (1994)) or by covalently joining to the immunoglobulin coding sequence all or part of the coding sequence for a non-immunoglobulin polypeptide. Such a non-immunoglobulin polypeptide can be substituted for the constant domains of an antibody of the invention, or can be substituted for the variable domains of one antigen-combining site of an antibody of the invention to create a chimeric bivalent antibody.

[0487] Humanized Antibodies

[0488] The antibodies directed against the protein antigens of the invention can further comprise humanized antibodies or human antibodies. These antibodies are suitable for administration to humans without engendering an immune response by the human against the administered immunoglobulin. Humanized forms of antibodies are chimeric immunoglobulins, immunoglobulin chains or fragments thereof (such as Fv, Fab, Fab′, F(ab′)₂ or other antigen-binding subsequences of antibodies) that are principally comprised of the sequence of a human immunoglobulin, and contain minimal sequence derived from a non-human immunoglobulin. Humanization can be performed following the method of Winter and co-workers (Jones et al., Nature, 321:522-525 (1986); Riechmann et al., Nature, 332:323-327 (1988); Verhoeyen et al., Science, 239:1534-1536 (1988)), by substituting rodent CDRs or CDR sequences for the corresponding sequences of a human antibody. (See also U.S. Pat. No. 5,225,539.) In some instances, Fv framework residues of the human immunoglobulin are replaced by corresponding non-human residues. Humanized antibodies can also comprise residues which are found neither in the recipient antibody nor in the imported CDR or framework sequences. In general, the humanized antibody will comprise substantially all of at least one, and typically two, variable domains, in which all or substantially all of the CDR regions correspond to those of a non-human immunoglobulin and all or substantially all of the framework regions are those of a human immunoglobulin consensus sequence. The humanized antibody optimally also will comprise at least a portion of an immunoglobulin constant region (Fc), typically that of a human immunoglobulin (Jones et al., 1986; Riechmann et al., 1988; and Presta, Curr. Op. Struct. Biol., 2:593-596 (1992)).

[0489] Human Antibodies

[0490] Fully human antibodies relate to antibody molecules in which essentially the entire sequences of both the light chain and the heavy chain, including the CDRs, arise from human genes. Such antibodies are termed “human antibodies”, or “fully human antibodies” herein. Human monoclonal antibodies can be prepared by the trioma technique; the human B-cell hybridoma technique (see Kozbor, et al., 1983 Immunol Today 4: 72) and the EBV hybridoma technique to produce human monoclonal antibodies (see Cole, et al., 1985 In: Monoclonal Antibodies and Cancer Therapy, Alan R. Liss, Inc., pp. 77-96). Human monoclonal antibodies may be utilized in the practice of the present invention and may be produced by using human hybridomas (see Cote, et al., 1983. Proc Natl Acad Sci USA 80: 2026-2030) or by transforming human B-cells with Epstein Barr Virus in vitro (see Cole, et al., 1985 In: Monoclonal Antibodies and Cancer Therapy, Alan R. Liss, Inc., pp. 77-96).

[0491] In addition, human antibodies can also be produced using additional techniques, including phage display libraries (Hoogenboom and Winter, J. Mol. Biol., 227:381 (1991); Marks et al., J. Mol. Biol., 222:581 (1991)). Similarly, human antibodies can be made by introducing human immunoglobulin loci into transgenic animals, e.g., mice in which the endogenous immunoglobulin genes have been partially or completely inactivated. Upon challenge, human antibody production is observed, which closely resembles that seen in humans in all respects, including gene rearrangement, assembly, and antibody repertoire. This approach is described, for example, in U.S. Pat. Nos. 5,545,807; 5,545,806; 5,569,825; 5,625,126; 5,633,425; 5,661,016, and in Marks et al. (Bio/Technology 10, 779-783 (1992)); Lonberg et al. (Nature 368 856-859 (1994)); Morrison (Nature 368, 812-13 (1994)); Fishwild et al, (Nature Biotechnology 14, 845-51 (1996)); Neuberger (Nature Biotechnology 14, 826 (1996)); and Lonberg and Huszar (Intern. Rev. Immunol. 13 65-93 (1995)).

[0492] Human antibodies may additionally be produced using transgenic nonhuman animals which are modified so as to produce fully human antibodies rather than the animal's endogenous antibodies in response to challenge by an antigen. (See PCT publication WO94/02602). The endogenous genes encoding the heavy and light immunoglobulin chains in the nonhuman host have been incapacitated, and active loci encoding human heavy and light chain immunoglobulins are inserted into the host's genome. The human genes are incorporated, for example, using yeast artificial chromosomes containing the requisite human DNA segments. An animal which provides all the desired modifications is then obtained as progeny by crossbreeding intermediate transgenic animals containing fewer than the full complement of the modifications. The preferred embodiment of such a nonhuman animal is a mouse, and is termed the Xenomouse™ as disclosed in PCT publications WO 96/33735 and WO 96/34096. This animal produces B cells which secrete fully human immunoglobulins. The antibodies can be obtained directly from the animal after immunization with an immunogen of interest, as, for example, a preparation of a polyclonal antibody, or alternatively from immortalized B cells derived from the animal, such as hybridomas producing monoclonal antibodies. Additionally, the genes encoding the immunoglobulins with human variable regions can be recovered and expressed to obtain the antibodies directly, or can be further modified to obtain analogs of antibodies such as, for example, single chain Fv molecules.

[0493] An example of a method of producing a nonhuman host, exemplified as a mouse, lacking expression of an endogenous immunoglobulin heavy chain is disclosed in U.S. Pat. No. 5,939,598. It can be obtained by a method including deleting the J segment genes from at least one endogenous heavy chain locus in an embryonic stem cell to prevent rearrangement of the locus and to prevent formation of a transcript of a rearranged immunoglobulin heavy chain locus, the deletion being effected by a targeting vector containing a gene encoding a selectable marker; and producing from the embryonic stem cell a transgenic mouse whose somatic and germ cells contain the gene encoding the selectable marker.

[0494] A method for producing an antibody of interest, such as a human antibody, is disclosed in U.S. Pat. No. 5,916,771. It includes introducing an expression vector that contains a nucleotide sequence encoding a heavy chain into one mammalian host cell in culture, introducing an expression vector containing a nucleotide sequence encoding a light chain into another mammalian host cell, and fusing the two cells to form a hybrid cell. The hybrid cell expresses an antibody containing the heavy chain and the light chain.

[0495] In a further improvement on this procedure, a method for identifying a clinically relevant epitope on an immunogen, and a correlative method for selecting an antibody that binds immunospecifically to the relevant epitope with high affinity, are disclosed in PCT publication WO 99/53049.

[0496] F_{ab} Fragments and Single Chain Antibodies

[0497] According to the invention, techniques can be adapted for the production of single-chain antibodies specific to an antigenic protein of the invention (see e.g., U.S. Pat. No. 4,946,778). In addition, methods can be adapted for the construction of F_{ab} expression libraries (see e.g., Huse, et al., 1989 Science 246: 1275-1281) to allow rapid and effective identification of monoclonal F_{ab} fragments with the desired specificity for a protein or derivatives, fragments, analogs or homologs thereof. Antibody fragments that contain the idiotypes to a protein antigen may be produced by techniques known in the art including, but not limited to: (i) an F_{(ab′)2} fragment produced by pepsin digestion of an antibody molecule; (ii) an F_{ab} fragment generated by reducing the disulfide bridges of an F_{(ab′)2} fragment; (iii) an F_{ab} fragment generated by the treatment of the antibody molecule with papain and a reducing agent and (iv) Fᵥ fragments.

[0498] Bispecific Antibodies

[0499] Bispecific antibodies are monoclonal, preferably human or humanized, antibodies that have binding specificities for at least two different antigens. In the present case, one of the binding specificities is for an antigenic protein of the invention. The second binding target is any other antigen, and advantageously is a cell-surface protein or receptor or receptor subunit.

[0500] Methods for making bispecific antibodies are known in the art. Traditionally, the recombinant production of bispecific antibodies is based on the co-expression of two immunoglobulin heavy-chain/light-chain pairs, where the two heavy chains have different specificities (Milstein and Cuello, Nature, 305:537-539 (1983)). Because of the random assortment of immunoglobulin heavy and light chains, these hybridomas (quadromas) produce a potential mixture of ten different antibody molecules, of which only one has the correct bispecific structure. The purification of the correct molecule is usually accomplished by affinity chromatography steps. Similar procedures are disclosed in WO 93/08829, published May 13, 1993, and in Traunecker et al., 1991 EMBO J., 10:3655-3659.

[0501] Antibody variable domains with the desired binding specificities (antibody-antigen combining sites) can be fused to immunoglobulin constant domain sequences. The fusion preferably is with an immunoglobulin heavy-chain constant domain, comprising at least part of the hinge, CH2, and CH3 regions. It is preferred to have the first heavy-chain constant region (CH1) containing the site necessary for light-chain binding present in at least one of the fusions. DNAs encoding the immunoglobulin heavy-chain fusions and, if desired, the immunoglobulin light chain, are inserted into separate expression vectors, and are co-transfected into a suitable host organism. For further details of generating bispecific antibodies see, for example, Suresh et al., Methods in Enzymology, 121:210 (1986).

[0502] According to another approach described in WO 96/27011, the interface between a pair of antibody molecules can be engineered to maximize the percentage of heterodimers which are recovered from recombinant cell culture. The preferred interface comprises at least a part of the CH3 region of an antibody constant domain. In this method, one or more small amino acid side chains from the interface of the first antibody molecule are replaced with larger side chains (e.g. tyrosine or tryptophan). Compensatory “cavities” of identical or similar size to the large side chain(s) are created on the interface of the second antibody molecule by replacing large amino acid side chains with smaller ones (e.g. alanine or threonine). This provides a mechanism for increasing the yield of the heterodimer over other unwanted end-products such as homodimers.

[0503] Bispecific antibodies can be prepared as full length antibodies or antibody fragments (e.g. F(ab′)₂ bispecific antibodies). Techniques for generating bispecific antibodies from antibody fragments have been described in the literature. For example, bispecific antibodies can be prepared using chemical linkage. Brennan et al., Science 229:81 (1985) describe a procedure wherein intact antibodies are proteolytically cleaved to generate F(ab′)₂, fragments. These fragments are reduced in the presence of the dithiol comHSP90 co-chaperoneg agent sodium arsenite to stabilize vicinal dithiols and prevent intermolecular disulfide formation. The Fab′ fragments generated are then converted to thionitrobenzoate (TNB) derivatives. One of the Fab′-TNB derivatives is then reconverted to the Fab′-thiol by reduction with mercaptoetbylamine and is mixed with an equimolar amount of the other Fab′-TNB derivative to form the bispecific antibody. The bispecific antibodies produced can be used as agents for the selective immobilization of enzymes.

[0504] Additionally, Fab′ fragments can be directly recovered from E. coli and chemically coupled to form bispecific antibodies. Shalaby et al., J. Exp. Med. 175:217-225 (1992) describe the production of a fully humanized bispecific antibody F(ab′)₂ molecule. Each Fab′ fragment was separately secreted from E. coli and subjected to directed chemical coupling in vitro to form the bispecific antibody. The bispecific antibody thus formed was able to bind to cells overexpressing the ErbB2 receptor and normal human T cells, as well as trigger the lytic activity of human cytotoxic lymphocytes against human breast tumor targets.

[0505] Various techniques for making and isolating bispecific antibody fragments directly from recombinant cell culture have also been described. For example, bispecific antibodies have been produced using leucine zippers. Kostelny et al., J. Immunol. 148(5):1547-1553 (1992). The leucine zipper peptides from the Fos and Jun proteins were linked to the Fab′ portions of two different antibodies by gene fusion. The antibody homodimers were reduced at the hinge region to form monomers and then re-oxidized to form the antibody heterodimers. This method can also be utilized for the production of antibody homodimers. The “diabody” technology described by Hollinger et al., Proc. Natl. Acad. Sci. USA 90:6444-6448 (1993) has provided an alternative mechanism for making bispecific antibody fragments. The fragments comprise a heavy-chain variable domain (V_{H}) connected to a light-chain variable domain (V_{L}) by a linker which is too short to allow pairing between the two domains on the same chain. Accordingly, the V_{H} and V_{L} domains of one fragment are forced to pair with the complementary V_{L} and V_{H} domains of another fragment, thereby forming two antigen-binding sites. Another strategy for making bispecific antibody fragments by the use of single-chain Fv (sFv) dimers has also been reported. See, Gruber et al., J. Immunol. 152:5368 (1994).

[0506] Antibodies with more than two valencies are contemplated. For example, trispecific antibodies can be prepared. Tutt et al., J. Immunol. 147:60 (1991).

[0507] Exemplary bispecific antibodies can bind to two different epitopes, at least one of which originates in the protein antigen of the invention. Alternatively, an anti-antigenic arm of an immunoglobulin molecule can be combined with an arm which binds to a triggering molecule on a leukocyte such as a T-cell receptor molecule (e.g. CD2, CD3, CD28, or B7), or Fc receptors for IgG (FcγR), such as FcγRI (CD64), FcγRII (CD32) and FcγRIII (CD16) so as to focus cellular defense mechanisms to the cell expressing the particular antigen. Bispecific antibodies can also be used to direct cytotoxic agents to cells which express a particular antigen. These antibodies possess an antigen-binding arm and an arm which binds a cytotoxic agent or a radionuclide chelator, such as EOTUBE, DPTA, DOTA, or TETA. Another bispecific antibody of interest binds the protein antigen described herein and further binds tissue factor (TF).

[0508] Heteroconjugate Antibodies

[0509] Heteroconjugate antibodies are also within the scope of the present invention. Heteroconjugate antibodies are composed of two covalently joined antibodies. Such antibodies have, for example, been proposed to target immune system cells to unwanted cells (U.S. Pat. No. 4,676,980), and for treatment of HIV infection (WO 91/00360; WO 92/200373; EP 03089). It is contemplated that the antibodies can be prepared in vitro using known methods in synthetic protein chemistry, including those involving crosslinking agents. For example, immunotoxins can be constructed using a disulfide exchange reaction or by forming a thioether bond. Examples of suitable reagents for this purpose include iminothiolate and methyl4-mercaptobutyrimidate and those disclosed, for example, in U.S. Pat. No. 4,676,980.

[0510] Effector Function Engineering

[0511] It can be desirable to modify the antibody of the invention with respect to effector function, so as to enhance, e.g., the effectiveness of the antibody in treating cancer. For example, cysteine residue(s) can be introduced into the Fe region, thereby allowing interchain disulfide bond formation in this region. The homodimeric antibody thus generated can have improved internalization capability and/or increased complement-mediated cell killing and antibody-dependent cellular cytotoxicity (ADCC). See Caron et al., J. Exp Med., 176: 1191-1195 (1992) and Shopes, J. Immunol., 148: 2918-2922 (1992). Homodimeric antibodies with enhanced anti-tumor activity can also be prepared using heterobifunctional cross-linkers as described in Wolff et al. Cancer Research, 53: 2560-2565 (1993). Alternatively, an antibody can be engineered that has dual Fc regions and can thereby have enhanced complement lysis and ADCC capabilities. See Stevenson et al., Anti-Cancer Drug Design, 3: 219-230 (1989).

[0512] Immunoconjugates

[0513] The invention also pertains to immunoconjugates comprising an antibody conjugated to a cytotoxic agent such as a chemotherapeutic agent, toxin (e.g., an enzymatically active toxin of bacterial, fungal, plant, or animal origin, or fragments thereof), or a radioactive isotope (i.e., a radioconjugate).

[0514] Chemotherapeutic agents useful in the generation of such immunoconjugates have been described above. Enzymatically active toxins and fragments thereof that can be used include diphtheria A chain, nonbinding active fragments of diphtheria toxin, exotoxin A chain (from Pseudomonas aeruginosa), ricin A chain, abrin A chain, modeccin A chain, alpha-sarcin, Aleurites fordii proteins, dianthin proteins, Phytolaca americana proteins (PAPI, PAPII, and PAP-S), momordica charantia inhibitor, curcin, crotin, sapaonaria officinalis inhibitor, gelonin, mitogellin, restrictocin, phenomycin, enomycin, and the tricothecenes. A variety of radionuclides are available for the production of radioconjugated antibodies. Examples include ²¹²Bi, ¹³¹I, ¹³¹In, ⁹⁰Y, and ¹⁸⁶Re.

[0515] Conjugates of the antibody and cytotoxic agent are made using a variety of bifunctional protein-coupling agents such as N-succinimidyl-3-(2-pyridyldithiol) propionate (SPDP), iminothiolane (IT), bifunctional derivatives of imidoesters (such as dimethyl adipimidate HCL), active esters (such as disuccinimidyl suberate), aldehydes (such as glutareldehyde), bis-azido compounds (such as bis (p-azidobenzoyl) hexanediamine), bis-diazonium derivatives (such as bis-(p-diazoniumbenzoyl)-ethylenediamine), diisocyanates (such as tolyene 2,6-diisocyanate), and bis-active fluorine compounds (such as 1,5-difluoro-2,4-dinitrobenzene). For example, a ricin immunotoxin can be prepared as described in Vitetta et al., Science, 238: 1098 (1987). Carbon-14-labeled 1-isothiocyanatobenzyl-3-methyldiethylene triaminepentaacetic acid (MX-DTPA) is an exemplary chelating agent for conjugation of radionucleotide to the antibody. See WO94/11026.

[0516] In another embodiment, the antibody can be conjugated to a “receptor” (such streptavidin) for utilization in tumor pretargeting wherein the antibody-receptor conjugate is administered to the patient, followed by removal of unbound conjugate from the circulation using a clearing agent and then administration of a “ligand” (e.g., avidin) that is in turn conjugated to a cytotoxic agent.

[0517] In one embodiment, methods for the screening of antibodies that possess the desired specificity include, but are not limited to, enzyme-linked immunosorbent assay (ELISA) and other immunologically-mediated techniques known within the art. In a specific embodiment, selection of antibodies that are specific to a particular domain of an NOVX protein is facilitated by generation of hybridomas that bind to the fragment of an NOVX protein possessing such a domain. Thus, antibodies that are specific for a desired domain within an NOVX protein, or derivatives, fragments, analogs or homologs thereof, are also provided herein.

[0518] Anti-NOVX antibodies may be used in methods known within the art relating to the localization and/or quantitation of an NOVX protein (e.g., for use in measuring levels of the NOVX protein within appropriate physiological samples, for use in diagnostic methods, for use in imaging the protein, and the like). In a given embodiment, antibodies for NOVX proteins, or derivatives, fragments, analogs or homologs thereof, that contain the antibody derived binding domain, are utilized as pharmacologically-active compounds (hereinafter “Therapeutics”).

[0519] An anti-NOVX antibody (e.g., monoclonal antibody) can be used to isolate an NOVX polypeptide by standard techniques, such as affinity chromatography or immunoprecipitation. An anti-NOVX antibody can facilitate the purification of natural NOVX polypeptide from cells and of recombinantly-produced NOVX polypeptide expressed in host cells. Moreover, an anti-NOVX antibody can be used to detect NOVX protein (e.g., in a cellular lysate or cell supernatant) in order to evaluate the abundance and pattern of expression of the NOVX protein. Anti-NOVX antibodies can be used diagnostically to monitor protein levels in tissue as part of a clinical testing procedure, e.g., to, for example, determine the efficacy of a given treatment regimen. Detection can be facilitated by coupling (i.e., physically linking) the antibody to a detectable substance. Examples of detectable substances include various enzymes, prosthetic groups, fluorescent materials, luminescent materials, bioluminescent materials, and radioactive materials. Examples of suitable enzymes include horseradish peroxidase, alkaline phosphatase, β-galactosidase, or acetylcholinesterase; examples of suitable prosthetic group complexes include streptavidinibiotin and avidin/biotin; examples of suitable fluorescent materials include umbelliferone, fluorescein, fluorescein isothiocyanate, rhodamine, dichlorotriazinylamine fluorescein, dansyl chloride or phycoerythrin; an example of a luminescent material includes luminol; examples of bioluminescent materials include luciferase, luciferin, and aequorin, and examples of suitable radioactive material include ¹²⁵I, ¹³¹I, ³⁵S or ³H.

[0520] NOVX Recombinant Expression Vectors and Host Cells

[0521] Another aspect of the invention pertains to vectors, preferably expression vectors, containing a nucleic acid encoding an NOVX protein, or derivatives, fragments, analogs or homologs thereof. As used herein, the term “vector” refers to a nucleic acid molecule capable of transporting another nucleic acid to which it has been linked. One type of vector is a “plasmid”, which refers to a circular double stranded DNA loop into which additional DNA segments can be ligated. Another type of vector is a viral vector, wherein additional DNA segments can be ligated into the viral genome. Certain vectors are capable of autonomous replication in a host cell into which they are introduced (e.g., bacterial vectors having a bacterial origin of replication and episomal mammalian vectors). Other vectors (e.g., non-episomal mammalian vectors) are integrated into the genome of a host cell upon introduction into the host cell, and thereby are replicated along with the host genome. Moreover, certain vectors are capable of directing the expression of genes to which they are operatively-linked. Such vectors are referred to herein as “expression vectors”. In general, expression vectors of utility in recombinant DNA techniques are often in the form of plasmids. In the present specification, “plasmid” and “vector” can be used interchangeably as the plasmid is the most commonly used form of vector. However, the invention is intended to include such other forms of expression vectors, such as viral vectors (e.g. replication defective retroviruses, adenoviruses and adeno-associated viruses), which serve equivalent functions.

[0522] The recombinant expression vectors of the invention comprise a nucleic acid of the invention in a form suitable for expression of the nucleic acid in a host cell, which means that the recombinant expression vectors include one or more regulatory sequences, selected on the basis of the host cells to be used for expression, that is operatively-linked to the nucleic acid sequence to be expressed. Within a recombinant expression vector, “operably-linked” is intended to mean that the nucleotide sequence of interest is linked to the regulatory sequence(s) in a manner that allows for expression of the nucleotide sequence (e.g. in an in vitro transcription/translation system or in a host cell when the vector is introduced into the host cell).

[0523] The term “regulatory sequence” is intended to includes promoters, enhancers and other expression control elements (e.g., polyadenylation signals). Such regulatory sequences are described, for example, in Goeddel, Gene Expression Technology: Methods in Enzymology 185, Academic Press, San Diego, Calif. (1990). Regulatory sequences include those that direct constitutive expression of a nucleotide sequence in many types of host cell and those that direct expression of the nucleotide sequence only in certain host cells (e g., tissue-specific regulatory sequences). It will be appreciated by those skilled in the art that the design of the expression vector can depend on such factors as the choice of the host cell to be transformed, the level of expression of protein desired, etc. The expression vectors of the invention can be introduced into host cells to thereby produce proteins or peptides, including fusion proteins or peptides, encoded by nucleic acids as described herein (e.g. NOVX proteins, mutant forms of NOVX proteins, fusion proteins, etc.).

[0524] The recombinant expression vectors of the invention can be designed for expression of NOVX proteins in prokaryotic or eukaryotic cells. For example, NOVX proteins can be expressed in bacterial cells such as Escherichia coli, insect cells (using baculovirus expression vectors) yeast cells or mammalian cells. Suitable host cells are discussed further in Goeddel, Gene Expression Technology: Methods in Enzymology 185, Academic Press, San Diego, Calif. (1990). Alternatively, the recombinant expression vector can be transcribed and translated in vitro, for example using T7 promoter regulatory sequences and T7 polymerase.

[0525] Expression of proteins in prokaryotes is most often carried out in Escherichia coli with vectors containing constitutive or inducible promoters directing the expression of either fusion or non-fusion proteins. Fusion vectors add a number of amino acids to a protein encoded therein, usually to the amino terminus of the recombinant protein. Such fusion vectors typically serve three purposes: (i) to increase expression of recombinant protein; (ii) to increase the solubility of the recombinant protein; and (iii) to aid in the purification of the recombinant protein by acting as a ligand in affinity purification. Often, in fusion expression vectors, a proteolytic cleavage site is introduced at the junction of the fusion moiety and the recombinant protein to enable separation of the recombinant protein from the fusion moiety subsequent to purification of the fusion protein. Such enzymes, and their cognate recognition sequences, include Factor Xa, thrombin and enterokinase. Typical fusion expression vectors include pGEX (Pharmacia Biotech Inc; Smith and Johnson, 1988. Gene 67: 3140), pMAL (New England Biolabs, Beverly, Mass.) and pRIT5 (Pharmacia, Piscataway, N.J.) that fuse glutathione S-transferase (GST), maltose E binding protein, or protein A, respectively, to the target recombinant protein.

[0526] Examples of suitable inducible non-fusion E. coli expression vectors include pTrc (Amrann et al., (1988) Gene 69:301-315) and pET 11d (Studier et al., GENE EXPRESSION TECHNOLOGY: METHODS IN ENZYMOLOGY 185, Academic Press, San Diego, Calif. (1990) 60-89).

[0527] One strategy to maximize recombinant protein expression in E. coli is to express the protein in a host bacteria with an impaired capacity to proteolytically cleave the recombinant protein. See, e.g., Gottesman, GENE EXPRESSION TECHNOLOGY: METHODS IN ENZYMOLOGY 185, Academic Press, San Diego, Calif. (1990) 119-128. Another strategy is to alter the nucleic acid sequence of the nucleic acid to be inserted into an expression vector so that the individual codons for each amino acid are those preferentially utilized in E. coli (see, e.g., Wada, et al., 1992. Nucl. Acids Res. 20: 2111-2118). Such alteration of nucleic acid sequences of the invention can be carried out by standard DNA synthesis techniques.

[0528] In another embodiment, the NOVX expression vector is a yeast expression vector. Examples of vectors for expression in yeast Saccharomyces cerivisae include pYepSec1 (Baldari, et al., 1987. EMBO J. 6: 229-234), pMFa (Kurjan and Herskowitz, 1982. Cell 30: 933-943), pJRY88 (Schultz et al., 1987. Gene 54: 113-123), pYES2 (Invitrogen Corporation, San Diego, Calif.), and picZ (InVitrogen Corp, San Diego, Calif.).

[0529] Alternatively, NOVX can be expressed in insect cells using baculovirus expression vectors. Baculovirus vectors available for expression of proteins in cultured insect cells (e.g., SF9 cells) include the pAc series (Smith, et al., 1983. Mol. Cell. Biol. 3: 2156-2165) and the pVL series (Lucklow and Summers, 1989. Virology 170: 31-39).

[0530] In yet another embodiment, a nucleic acid of the invention is expressed in mammalian cells using a mammalian expression vector. Examples of mammalian expression vectors include pCDM8 (Seed, 1987. Nature 329: 840) and pMT2PC (Kaufman, et al., 1987. EMBO J. 6: 187-195). When used in mammalian cells, the expression vector's control functions are often provided by viral regulatory elements. For example, commonly used promoters are derived from polyoma, adenovirus 2, cytomegalovirus, and simian virus 40. For other suitable expression systems for both prokaryotic and eukaryotic cells see, e.g., Chapters 16 and 17 of Sambrook, et al., MOLECULAR CLONING: A LABORATORY MANUAL. 2nd ed., Cold Spring Harbor Laboratory, Cold Spring Harbor Laboratory Press, Cold Spring Harbor, N.Y., 1989.

[0531] In another embodiment, the recombinant mammalian expression vector is capable of directing expression of the nucleic acid preferentially in a particular cell type (e.g., tissue-specific regulatory elements are used to express the nucleic acid). Tissue-specific regulatory elements are known in the art. Non-limiting examples of suitable tissue-specific promoters include the albumin promoter (liver-specific; Pinkert, et al., 1987. Genes Dev. 1: 268-277), lymphoid-specific promoters (Calame and Eaton, 1988. Adv. Immunol. 43: 235-275), in particular promoters of T cell receptors (Winoto and Baltimore, 1989. EMBO J. 8: 729-733) and immunoglobulins (Baneiji, et al., 1983. Cell 33: 729-740; Queen and Baltimore, 1983. Cell 33: 741-748), neuron-specific promoters (e.g., the neurofilament promoter; Byrne and Ruddle, 1989. Proc. Natl. Acad. Sci. USA 86: 5473-5477), pancreas-specific promoters (Edlund, et al., 1985. Science 230: 912-916), and mammary gland-specific promoters (e.g., milk whey promoter; U.S. Pat. No. 4,873,316 and European Application Publication No. 264,166). Developmentally-regulated promoters are also encompassed, e.g., the murine hox promoters (Kessel and Gruss, 1990. Science 249: 374-379) and the α-fetoprotein promoter (Campes and Tilghman, 1989. Genes Dev. 3: 537-546).

[0532] The invention further provides a recombinant expression vector comprising a DNA molecule of the invention cloned into the expression vector in an antisense orientation. That is, the DNA molecule is operatively-linked to a regulatory sequence in a manner that allows for expression (by transcription of the DNA molecule) of an RNA molecule that is antisense to NOVX mRNA. Regulatory sequences operatively linked to a nucleic acid cloned in the antisense orientation can be chosen that direct the continuous expression of the antisense RNA molecule in a variety of cell types, for instance viral promoters and/or enhancers, or regulatory sequences can be chosen that direct constitutive, tissue specific or cell type specific expression of antisense RNA. The antisense expression vector can be in the form of a recombinant plasmid, phagemid or attenuated virus in which antisense nucleic acids are produced under the control of a high efficiency regulatory region, the activity of which can be determined by the cell type into which the vector is introduced. For a discussion of the regulation of gene expression using antisense genes see, e.g., Weintraub, et al., “Antisense RNA as a molecular tool for genetic analysis,” Reviews-Trends in Genetics, Vol. 1(1) 1986.

[0533] Another aspect of the invention pertains to host cells into which a recombinant expression vector of the invention has been introduced. The terms “host cell” and “recombinant host cell” are used interchangeably herein. It is understood that such terms refer not only to the particular subject cell but also to the progeny or potential progeny of such a cell. Because certain modifications may occur in succeeding generations due to either mutation or environmental influences, such progeny may not, in fact, be identical to the parent cell, but are still included within the scope of the term as used herein.

[0534] A host cell can be any prokaryotic or eukaryotic cell. For example, NOVX protein can be expressed in bacterial cells such as E. coli, insect cells, yeast or mammalian cells (such as Chinese hamster ovary cells (CHO) or COS cells). Other suitable host cells are known to those skilled in the art.

[0535] Vector DNA can be introduced into prokaryotic or eukaryotic cells via conventional transformation or transfection techniques. As used herein, the terms “transformation” and “transfection” are intended to refer to a variety of art-recognized techniques for introducing foreign nucleic acid (e.g., DNA) into a host cell, including calcium phosphate or calcium chloride co-precipitation, DEAE-dextran-mediated transfection, lipofection, or electroporation. Suitable methods for transforming or transfecting host cells can be found in Sambrook, et al. (MOLECULAR CLONING: A LABORATORY MANUAL. 2nd ed., Cold Spring Harbor Laboratory, Cold Spring Harbor Laboratory Press, Cold Spring Harbor, N.Y., 1989), and other laboratory manuals.

[0536] For stable transfection of mammalian cells, it is known that, depending upon the expression vector and transfection technique used, only a small fraction of cells may integrate the foreign DNA into their genome. In order to identify and select these integrants, a gene that encodes a selectable marker (e.g., resistance to antibiotics) is generally introduced into the host cells along with the gene of interest. Various selectable markers include those that confer resistance to drugs, such as G418, hygromycin and methotrexate. Nucleic acid encoding a selectable marker can be introduced into a host cell on the same vector as that encoding NOVX or can be introduced on a separate vector. Cells stably transfected with the introduced nucleic acid can be identified by drug selection (e.g., cells that have incorporated the selectable marker gene will survive, while the other cells die).

[0537] A host cell of the invention, such as a prokaryotic or eukaryotic host cell in culture, can be used to produce (i.e., express) NOVX protein. Accordingly, the invention further provides methods for producing NOVX protein using the host cells of the invention. In one embodiment, the method comprises culturing the host cell of invention (into which a recombinant expression vector encoding NOVX protein has been introduced) in a suitable medium such that NOVX protein is produced. In another embodiment, the method further comprises isolating NOVX protein from the medium or the host cell.

[0538] Transgenic NOVX Animals

[0539] The host cells of the invention can also be used to produce non-human transgenic animals. For example, in one embodiment, a host cell of the invention is a fertilized oocyte or an embryonic stem cell into which NOVX protein-coding sequences have been introduced. Such host cells can then be used to create non-human transgenic animals in which exogenous NOVX sequences have been introduced into their genome or homologous recombinant animals in which endogenous NOVX sequences have been altered. Such animals are useful for studying the function and/or activity of NOVX protein and for identifying and/or evaluating modulators of NOVX protein activity. As used herein, a “transgenic animal” is a non-human animal, preferably a mammal, more preferably a rodent such as a rat or mouse, in which one or more of the cells of the animal includes a transgene. Other examples of transgenic animals include non-human primates, sheep, dogs, cows, goats, chickens, amphibians, etc. A transgene is exogenous DNA that is integrated into the genome of a cell from which a transgenic animal develops and that remains in the genome of the mature animal, thereby directing the expression of an encoded gene product in one or more cell types or tissues of the transgenic animal. As used herein, a “homologous recombinant animal” is a non-human animal, preferably a mammal, more preferably a mouse, in which an endogenous NOVX gene has been altered by homologous recombination between the endogenous gene and an exogenous DNA molecule introduced into a cell of the animal, e.g., an embryonic cell of the animal, prior to development of the animal.

[0540] A transgenic animal of the invention can be created by introducing NOVX-encoding nucleic acid into the male pronuclei of a fertilized oocyte (e.g., by microinjection, retroviral infection) and allowing the oocyte to develop in a pseudopregnant female foster animal. The human NOVX cDNA sequences SEQ ID NOS: 1, 3, 5, 7, 9, 11, 13, 15, 17, 19, 21, 23, 25, 27, 29, 31, 33, 35, 37, 39, 41, 43, 45, 47, 49, 51, 53, 55, and 57 can be introduced as a transgene into the genome of a non-human animal. Alternatively, a non-human homologue of the human NOVX gene, such as a mouse NOVX gene, can be isolated based on hybridization to the human NOVX cDNA (described further supra) and used as a transgene. Intronic sequences and polyadenylation signals can also be included in the transgene to increase the efficiency of expression of the transgene. A tissue-specific regulatory sequence(s) can be operably-linked to the NOVX transgene to direct expression of NOVX protein to particular cells. Methods for generating transgenic animals via embryo manipulation and microinjection, particularly animals such as mice, have become conventional in the art and are described, for example, in U.S. Pat. Nos. 4,736,866; 4,870,009; and 4,873,191; and Hogan, 1986. In: MANIPULATING THE MOUSE EMBRYO, Cold Spring Harbor Laboratory Press, Cold Spring Harbor, N.Y. Similar methods are used for production of other transgenic animals. A transgenic founder animal can be identified based upon the presence of the NOVX transgene in its genome and/or expression of NOVX mRNA in tissues or cells of the animals. A transgenic founder animal can then be used to breed additional animals carrying the transgene. Moreover, transgenic animals carrying a transgene-encoding NOVX protein can further be bred to other transgenic animals carrying other transgenes.

[0541] To create a homologous recombinant animal, a vector is prepared which contains at least a portion of an NOVX gene into which a deletion, addition or substitution has been introduced to thereby alter, e.g., functionally disrupt, the NOVX gene. The NOVX gene can be a human gene (e.g., the cDNA of SEQ ID NOS: 1, 3, 5, 7, 9, 11, 13, 15, 17, 19, 21, 23, 25, 27, 29, 31, 33, 35, 37, 39, 41, 43, 45, 47, 49, 51, 53, 55, and 57), but more preferably, is a non-human homologue of a human NOVX gene. For example, a mouse homologue of human NOVX gene of SEQ ID NOS: 1, 3, 5, 7, 9, 11, 13, 15, 17, 19, 21, 23, 25, 27, 29, 31, 33, 35, 37, 39, 41, 43, 45, 47, 49, 51, 53, 55, and 57 can be used to construct a homologous recombination vector suitable for altering an endogenous NOVX gene in the mouse genome. In one embodiment, the vector is designed such that, upon homologous recombination, the endogenous NOVX gene is functionally disrupted (i.e., no longer encodes a functional protein; also referred to as a “knock out” vector).

[0542] Alternatively, the vector can be designed such that, upon homologous recombination, the endogenous NOVX gene is mutated or otherwise altered but still encodes functional protein (e.g., the upstream regulatory region can be altered to thereby alter the expression of the endogenous NOVX protein). In the homologous recombination vector, the altered portion of the NOVX gene is flanked at its 5′- and 3′-termini by additional nucleic acid of the NOVX gene to allow for homologous recombination to occur between the exogenous NOVX gene carried by the vector and an endogenous NOVX gene in an embryonic stem cell. The additional flanking NOVX nucleic acid is of sufficient length for successful homologous recombination with the endogenous gene. Typically, several kilobases of flanking DNA (both at the 5′- and 3′-termini) are included in the vector. See, e.g., Thomas, et al., 1987. Cell 51: 503 for a description of homologous recombination vectors. The vector is ten introduced into an embryonic stem cell line (e.g., by electroporation) and cells in which the introduced NOVX gene has homologously-recombined with the endogenous NOVX gene are selected. See, e.g., Li, et al., 1992. Cell 69: 915.

[0543] The selected cells are then injected into a blastocyst of an animal (e.g., a mouse) to form aggregation chimeras. See, e.g., Bradley, 1987. In: Teratocarcinomas and Embryonic Stem Cells: A Practical Approach, Robertson, ed. IRL, Oxford, pp. 113-152. A chimeric embryo can then be implanted into a suitable pseudopregnant female foster animal and the embryo brought to term. Progeny harboring the homologously-recombined DNA in their germ cells can be used to breed animals in which all cells of the animal contain the homologously-recombined DNA by germline transmission of the transgene. Methods for constructing homologous recombination vectors and homologous recombinant animals are described further in Bradley, 1991. Curr. Opin. Biotechnol. 2: 823-829; PCT International Publication Nos.: WO 90/11354; WO 91/01140; WO 92/0968; and WO 93/04169.

[0544] In another embodiment, transgenic non-humans animals can be produced that contain selected systems that allow for regulated expression of the transgene. One example of such a system is the cre/loxP recombinase system of bacteriophage P1. For a description of the cre/loxP recombinase system, See, e.g., Lakso, et al., 1992. Proc. Natl. Acad. Sci. USA 89: 6232-6236. Another example of a recombinase system is the FLP recombinase system of Saccharomyces cerevisiae. See, O'Gorman, et al., 1991. Science 251:1351-1355. If a cre/loxP recombinase system is used to regulate expression of the transgene, animals containing transgenes encoding both the Cre recombinase and a selected protein are required. Such animals can be provided through the construction of “double” transgenic animals, e.g., by mating two transgenic animals, one containing a transgene encoding a selected protein and the other containing a transgene encoding a recombinase.

[0545] Clones of the non-human transgenic animals described herein can also be produced according to the methods described in Wilmut, et al., 1997. Nature 385: 810-813. In brief, a cell (e.g., a somatic cell) from the transgenic animal can be isolated and induced to exit the growth cycle and enter G₀ phase. The quiescent cell can then be fused, e.g., through the use of electrical pulses, to an enucleated oocyte from an animal of the same species from which the quiescent cell is isolated. The reconstructed oocyte is then cultured such that it develops to morula or blastocyte and then transferred to pseudopregnant female foster animal. The offspring borne of this female foster animal will be a clone of the animal from which the cell (e.g., the somatic cell) is isolated.

[0546] Pharmaceutical Compositions

[0547] The NOVX nucleic acid molecules, NOVX proteins, and anti-NOVX antibodies (also referred to herein as “active compounds”) of the invention, and derivatives, fragments, analogs and homologs thereof, can be incorporated into pharmaceutical compositions suitable for administration. Such compositions typically comprise the nucleic acid molecule, protein, or antibody and a pharmaceutically acceptable carrier. As used herein, “pharmaceutically acceptable carrier” is intended to include any and all solvents, dispersion media, coatings, antibacterial and antifungal agents, isotonic and absorption delaying agents, and the like, compatible with pharmaceutical administration. Suitable carriers are described in the most recent edition of Remington's Pharmaceutical Sciences, a standard reference text in the field, which is incorporated herein by reference. Preferred examples of such carriers or diluents include, but are not limited to, water, saline, finger's solutions, dextrose solution, and 5% human serum albumin. Liposomes and non-aqueous vehicles such as fixed oils may also be used: The use of such media and agents for pharmaceutically active substances is well known in the art. Except insofar as any conventional media or agent is incompatible with the active compound, use thereof in the compositions is contemplated. Supplementary active compounds can also be incorporated into the compositions.

[0548] A pharmaceutical composition of the invention is formulated to be compatible with its intended route of administration. Examples of routes of administration include parenteral, e.g., intravenous, intradermal, subcutaneous, oral (e.g., inhalation), transdermal (i.e., topical), transmucosal, and rectal administration. Solutions or suspensions used for parenteral, intradermal, or subcutaneous application can include the following components: a sterile diluent such as water for injection, saline solution, fixed oils, polyethylene glycols, glycerine, propylene glycol or other synthetic solvents; antibacterial agents such as benzyl alcohol or methyl parabens; antioxidants such as ascorbic acid or sodium bisulfite; chelating agents such as ethylenediaminetetraacetic acid (EDTA); buffers such as acetates, citrates or phosphates, and agents for the adjustment of tonicity such as sodium chloride or dextrose. The pH can be adjusted with acids or bases, such as hydrochloric acid or sodium hydroxide. The parenteral preparation can be enclosed in ampoules, disposable syringes or multiple dose vials made of glass or plastic.

[0549] Pharmaceutical compositions suitable for injectable use include sterile aqueous solutions (where water soluble) or dispersions and sterile powders for the extemporaneous preparation of sterile injectable solutions or dispersion. For intravenous administration, suitable carriers include physiological saline, bacteriostatic water, Cremophor EL™ (BASF, Parsippany, N.J.) or phosphate buffered saline (PBS). In all cases, the composition must be sterile and should be fluid to the extent that easy syringeability exists. It must be stable under the conditions of manufacture and storage and must be preserved against the contaminating action of microorganisms such as bacteria and fungi. The carrier can be a solvent or dispersion medium containing, for example, water, ethanol, polyol (for example, glycerol, propylene glycol, and liquid polyethylene glycol, and the like), and suitable mixtures thereof. The proper fluidity can be maintained, for example, by the use of a coating such as lecithin, by the maintenance of the required particle size in the case of dispersion and by the use of surfactants. Prevention of the action of microorganisms can be achieved by various antibacterial and antifungal agents, for example, parabens, chlorobutanol, phenol, ascorbic acid, thimerosal, and the like. In many cases, it will be preferable to include isotonic agents, for example, sugars, polyalcohols such as manitol, sorbitol, sodium chloride in the composition. Prolonged absorption of the injectable compositions can be brought about by including in the composition an agent which delays absorption, for example, aluminum monostearate and gelatin.

[0550] Sterile injectable solutions can be prepared by incorporating the active compound (e.g., an NOVX protein or anti-NOVX antibody) in the required amount in an appropriate solvent with one or a combination of ingredients enumerated above, as required, followed by filtered sterilization. Generally, dispersions are prepared by incorporating the active compound into a sterile vehicle that contains a basic dispersion medium and the required other ingredients from those enumerated above. In the case of sterile powders for the preparation of sterile injectable solutions, methods of preparation are vacuum drying and freeze-drying that yields a powder of the active ingredient plus any additional desired ingredient from a previously sterile-filtered solution thereof.

[0551] Oral compositions generally include an inert diluent or an edible carrier. They can be enclosed in gelatin capsules or compressed into tablets. For the purpose of oral therapeutic administration, the active compound can be incorporated with excipients and used in the form of tablets, troches, or capsules. Oral compositions can also be prepared using a fluid carrier for use as a mouthwash, wherein the compound in the fluid carrier is applied orally and swished and expectorated or swallowed. Pharmaceutically compatible binding agents, and/or adjuvant materials can be included as part of the composition. The tablets, pills, capsules, troches and the like can contain any of the following ingredients, or compounds of a similar nature: a binder such as microcrystalline cellulose, gum tragacanth or gelatin; an excipient such as starch or lactose, a disintegrating agent such as alginic acid, Primogel, or corn starch; a lubricant such as magnesium stearate or Sterotes; a glidant such as colloidal silicon dioxide; a sweetening agent such as sucrose or saccharin; or a flavoring agent such as peppermint, methyl salicylate, or orange flavoring.

[0552] For administration by inhalation, the compounds are delivered in the form of an aerosol spray from pressured container or dispenser which contains a suitable propellant, e.g., a gas such as carbon dioxide, or a nebulizer.

[0553] Systemic administration can also be by transmucosal or transdermal means. For transmucosal or transdermal administration, penetrants appropriate to the barrier to be permeated are used in the formulation. Such penetrants are generally known in the art, and include, for example, for transmucosal administration, detergents, bile salts, and fusidic acid derivatives. Transmucosal administration can be accomplished through the use of nasal sprays or suppositories. For transdermal administration, the active compounds are formulated into ointments, salves, gels, or creams as generally known in the art.

[0554] The compounds can also be prepared in the form of suppositories (e.g., with conventional suppository bases such as cocoa butter and other glycerides) or retention enemas for rectal delivery.

[0555] In one embodiment, the active compounds are prepared with carriers that will protect the compound against rapid elimination from the body, such as a controlled release formulation, including implants and microencapsulated delivery systems. Biodegradable, biocompatible polymers can be used, such as ethylene vinyl acetate, polyanhydrides, polyglycolic acid, collagen, polyorthoesters, and polylactic acid. Methods for preparation of such formulations will be apparent to those skilled in the art. The materials can also be obtained commercially from Alza Corporation and Nova Pharmaceuticals, Inc. Liposomal suspensions (including liposomes targeted to infected cells with monoclonal antibodies to viral antigens) can also be used as pharmaceutically acceptable carriers. These can be prepared according to methods known to those skilled in the art, for example, as described in U.S. Pat. No. 4,522,811.

[0556] It is especially advantageous to formulate oral or parenteral compositions in dosage unit form for ease of administration and uniformity of dosage. Dosage unit form as used herein refers to physically discrete units suited as unitary dosages for the subject to be treated; each unit containing a predetermined quantity of active compound calculated to produce the desired therapeutic effect in association with the required pharmaceutical carrier. The specification for the dosage unit forms of the invention are dictated by and directly dependent on the unique characteristics of the active compound and the particular therapeutic effect to be achieved, and the limitations inherent in the art of compounding such an active compound for the treatment of individuals.

[0557] The nucleic acid molecules of the invention can be inserted into vectors and used as gene therapy vectors. Gene therapy vectors can be delivered to a subject by, for example, intravenous injection, local administration (see, e.g., U.S. Pat. No. 5,328,470) or by stereotactic injection (see, e.g., Chen, et al., 1994. Proc. Natl. Acad. Sci. USA 91: 3054-3057). The pharmaceutical preparation of the gene therapy vector can include the gene therapy vector in an acceptable diluent, or can comprise a slow release matrix in which the gene delivery vehicle is imbedded. Alternatively, where the complete gene delivery vector can be produced intact from recombinant cells, e.g., retroviral vectors, the pharmaceutical preparation can include one or more cells that produce the gene delivery system.

[0558] The pharmaceutical compositions can be included in a container, pack, or dispenser together with instructions for administration.

[0559] Screening and Detection Methods

[0560] The isolated nucleic acid molecules of the invention can be used to express NOVX protein (e.g., via a recombinant expression vector in a host cell in gene therapy applications), to detect NOVX mRNA (e.g., in a biological sample) or a genetic lesion in an NOVX gene, and to modulate NOVX activity, as described further, below. In addition, the NOVX proteins can be used to screen drugs or compounds that modulate the NOVX protein activity or expression as well as to treat disorders characterized by insufficient or excessive production of NOVX protein or production of NOVX protein forms that have decreased or aberrant activity compared to NOVX wild-type protein (e.g.; diabetes (regulates insulin release); obesity (binds and transport lipids); metabolic disturbances associated with obesity, the metabolic syndrome X as well as anorexia and wasting disorders associated with chronic diseases and various cancers, and infectious disease(possesses anti-microbial activity) and the various dyslipidemias. In addition, the anti-NOVX antibodies of the invention can be used to detect and isolate NOVX proteins and modulate NOVX activity. In yet a further aspect, the invention can be used in methods to influence appetite, absorption of nutrients and the disposition of metabolic substrates in both a positive and negative fashion.

[0561] The invention further pertains to novel agents identified by the screening assays described herein and uses thereof for treatments as described, supra.

[0562] Screening Assays

[0563] The invention provides a method (also referred to herein as a “screening assay”) for identifying modulators, i.e., candidate or test compounds or agents (e.g., peptides, peptidomimetics, small molecules or other drugs) that bind to NOVX proteins or have a stimulatory or inhibitory effect on, e.g., NOVX protein expression or NOVX protein activity. The invention also includes compounds identified in the screening assays described herein.

[0564] In one embodiment, the invention provides assays for screening candidate or test compounds which bind to or modulate the activity of the membrane-bound form of an NOVX protein or polypeptide or biologically-active portion thereof. The test compounds of the invention can be obtained using any of the numerous approaches in combinatorial library methods known in the art, including: biological libraries; spatially addressable parallel solid phase or solution phase libraries; synthetic library methods requiring deconvolution; the “one-bead one-compound” library method; and synthetic library methods using affinity chromatography selection. The biological library approach is limited to peptide libraries, while the other four approaches are applicable to peptide, non-peptide oligomer or small molecule libraries of compounds. See, e.g., Lam, 1997. Anticancer Drug Design 12: 145.

[0565] A “small molecule” as used herein, is meant to refer to a composition that has a molecular weight of less than about 5 kD and most preferably less than about 4 kD. Small molecules can be, e.g., nucleic acids, peptides, polypeptides, peptidomimetics, carbohydrates, lipids or other organic or inorganic molecules. Libraries of chemical and/or biological mixtures, such as fungal, bacterial, or algal extracts, are known in the art and can be screened with any of the assays of the invention.

[0566] Examples of methods for the synthesis of molecular libraries can be found in the art, for example in: DeWitt, et al., 1993. Proc. Natl. Acad. Sci. U.S.A. 90: 6909; Erb, et al., 1994. Proc. Natl. Acad. Sci. U.S.A. 91: 11422; Zuckermann, et al., 1994. J. Med. Chem. 37: 2678; Cho, et al., 1993. Science 261: 1303; Carrell, et al., 1994. Angew. Chem. Int. Ed. Engl. 33: 2059; Carell, et al., 1994. Angew. Chem. Int. Ed. Engl. 33: 2061; and Gallop, et al., 1994. J. Med. Chem. 37:1233.

[0567] Libraries of compounds may be presented in solution (e.g., Houghten, 1992. Biotechniques 13: 412-421), or on beads (Lam, 1991. Nature 354: 82-84), on chips (Fodor, 1993. Nature 364: 555-556), bacteria (Ladner, U.S. Pat. No. 5,223,409), spores (Ladner, U.S. Pat No. 5,233,409), plasmids (Cull, et al., 1992. Proc. Natl. Acad. Sci USA 89: 1865-1869) or on phage (Scott and Smith, 1990. Science 249: 386-390; Devlin, 1990. Science 249: 404406; Cwirla, et al., 1990. Proc. Natl. Acad. Sci. U.S.A. 87: 6378-6382; Felici, 1991. J. Mol. Biol. 222: 301-310; Ladner, U.S. Pat. No. 5,233,409.).

[0568] In one embodiment, an assay is a cell-based assay in which a cell which expresses a membrane-bound form of NOVX protein, or a biologically-active portion thereof, on the cell surface is contacted with a test compound and the ability of the test compound to bind to an NOVX protein determined. The cell, for example, can of mammalian origin or a yeast cell. Determining the ability of the test compound to bind to the NOVX protein can be accomplished, for example, by coupling the test compound with a radioisotope or enzymatic label such that binding of the test compound to the NOVX protein or biologically-active portion thereof can be determined by detecting the labeled compound in a complex. For example, test compounds can be labeled with ¹²⁵I, ³⁵S, ¹⁴C, or ³H, either directly or indirectly, and the radioisotope detected by direct counting of radioemission or by scintillation counting. Alternatively, test compounds can be enzymatically-labeled with, for example, horseradish peroxidase, alkaline phosphatase, or luciferase, and the enzymatic label detected by determination of conversion of an appropriate substrate to product. In one embodiment, the assay comprises contacting a cell which expresses a membrane-bound form of NOVX protein, or a biologically-active portion thereof, on the cell surface with a known compound which binds NOVX to form an assay mixture, contacting the assay mixture with a test compound, and determining the ability of the test compound to interact with an NOVX protein, wherein determining the ability of the test compound to interact with an NOVX protein comprises determining the ability of the test compound to preferentially bind to NOVX protein or a biologically-active portion thereof as compared to the known compound.

[0569] In another embodiment, an assay is a cell-based assay comprising contacting a cell expressing a membrane-bound form of NOVX protein, or a biologically-active portion thereof, on the cell surface with a test compound and determining the ability of the test compound to modulate (e.g., stimulate or inhibit) the activity of the NOVX protein or biologically-active portion thereof. Determining the ability of the test compound to modulate the activity of NOVX or a biologically-active portion thereof can be accomplished, for example, by determining the ability of the NOVX protein to bind to or interact with an NOVX target molecule. As used herein, a “target molecule” is a molecule with which an NOVX protein binds or interacts in nature, for example, a molecule on the surface of a cell which expresses an NOVX interacting protein, a molecule on the surface of a second cell, a molecule in the extracellular milieu, a molecule associated with the internal surface of a cell membrane or a cytoplasmic molecule. An NOVX target molecule can be a non-NOVX molecule or an NOVX protein or polypeptide of the invention. In one embodiment, an NOVX target molecule is a component of a signal transduction pathway that facilitates transduction of an extracellular signal (e.g. a signal generated by binding of a compound to a membrane-bound NOVX molecule) through the cell membrane and into the cell. The target, for example, can be a second intercellular protein that has catalytic activity or a protein that facilitates the association of downstream signaling molecules with NOVX.

[0570] Determining the ability of the NOVX protein to bind to or interact with an NOVX target molecule can be accomplished by one of the methods described above for determining direct binding. In one embodiment, determining the ability of the NOVX protein to bind to or interact with an NOVX target molecule can be accomplished by determining the activity of the target molecule. For example, the activity of the target molecule can be determined by detecting induction of a cellular second messenger of the target (i.e. intracellular Ca²+, diacylglycerol, IP_{3,} etc.), detecting catalytic/enzymatic activity of the target an appropriate substrate, detecting the induction of a reporter gene (comprising an NOVX-responsive regulatory element operatively linked to a nucleic acid encoding a detectable marker, e.g., luciferase), or detecting a cellular response, for example, cell survival, cellular differentiation, or cell proliferation.

[0571] In yet another embodiment, an assay of the invention is a cell-free assay comprising contacting an NOVX protein or biologically-active portion thereof with a test compound and determining the ability of the test compound to bind to the NOVX protein or biologically-active portion thereof. Binding of the test compound to the NOVX protein can be determined either directly or indirectly as described above. In one such embodiment, the assay comprises contacting the NOVX protein or biologically-active portion thereof with a known compound which binds NOVX to form an assay mixture, contacting the assay mixture with a test compound, and determining the ability of the test compound to interact with an NOVX protein, wherein determining the ability of the test compound to interact with an NOVX protein comprises determining the ability of the test compound to preferentially bind to NOVX or biologically-active portion thereof as compared to the known compound.

[0572] In still another embodiment, an assay is a cell-free assay comprising contacting NOVX protein or biologically-active portion thereof with a test compound and determining the ability of the test compound to modulate (e.g. stimulate or inhibit) the activity of the NOVX protein or biologically-active portion thereof. Determining the ability of the test compound to modulate the activity of NOVX can be accomplished, for example, by determining the ability of the NOVX protein to bind to an NOVX target molecule by one of the methods described above for determining direct binding. In an alternative embodiment, determining the ability of the test compound to modulate the activity of NOVX protein can be accomplished by determining the ability of the NOVX protein further modulate an NOVX target molecule. For example, the catalytic/enzymatic activity of the target molecule on an appropriate substrate can be determined as described, supra.

[0573] In yet another embodiment, the cell-free assay comprises contacting the NOVX protein or biologically-active portion thereof with a known compound which binds NOVX protein to form an assay mixture, contacting the assay mixture with a test compound, and determining the ability of the test compound to interact with an NOVX protein, wherein determining the ability of the test compound to interact with an NOVX protein comprises determining the ability of the NOVX protein to preferentially bind to or modulate the activity of an NOVX target molecule.

[0574] The cell-free assays of the invention are amenable to use of both the soluble form or the membrane-bound form of NOVX protein. In the case of cell-free assays comprising the membrane-bound form of NOVX protein, it may be desirable to utilize a solubilizing agent such that the membrane-bound form of NOVX protein is maintained in solution. Examples of such solubilizing agents include non-ionic detergents such as n-octylglucoside, n-dodecylglucoside, n-dodecylmaltoside, octanoyl-N-methylglucamide, decanoyl-N-methylglucamide, Triton® X-100, Triton® X-1 14, Thesit®, Isotridecypoly(ethylene glycol ether)ₙ, N-dodecyl-N,N-dimethyl-3-ammonio-1-propane sulfonate, 3-(3-cholamidopropyl) dimethylamminiol-1-propane sulfonate (CHAPS), or 3-(3-cholamidopropyl)dimethylamminiol-2-hydroxy-1-propane sulfonate (CHAPSO).

[0575] In more than one embodiment of the above assay methods of the invention, it may be desirable to immobilize either NOVX protein or its target molecule to facilitate separation of complexed from uncomplexed forms of one or both of the proteins, as well as to accommodate automation of the assay. Binding of a test compound to NOVX protein, or interaction of NOVX protein with a target molecule in the presence and absence of a candidate compound, can be accomplished in any vessel suitable for containing the reactants. Examples of such vessels include microtiter plates, test tubes, and micro-centrifuge tubes. In one embodiment, a fusion protein can be provided that adds a domain that allows one or both of the proteins to be, bound to a matrix. For example, GST-NOVX fusion proteins or GST-target fusion proteins can be adsorbed onto glutathione sepharose beads (Sigma Chemical, St. Louis, Mo.) or glutathione derivatized microtiter plates, that are then combined with the test compound or the test compound and either the non-adsorbed target protein or NOVX protein, and the mixture is incubated under conditions conducive to complex formation (e.g., at physiological conditions for salt and pH). Following incubation, the beads or microtiter plate wells are washed to remove any unbound components, the matrix immobilized in the case of beads, complex determined either directly or indirectly, for example, as described, supra. Alternatively, the complexes can be dissociated from the matrix, and the level of NOVX protein binding or activity determined using standard techniques.

[0576] Other techniques for immobilizing proteins on matrices can also be used in the screening assays of the invention. For example, either the NOVX protein or its target molecule can be immobilized utilizing conjugation of biotin and streptavidin. Biotinylated NOVX protein or target molecules can be prepared from biotin-NHS (N-hydroxy-succinimide) using techniques well-known within the art (e.g., biotinylation kit, Pierce Chemicals, Rockford, Ill.), and immobilized in the wells of streptavidin-coated 96 well plates (Pierce Chemical). Alternatively, antibodies reactive with NOVX protein or target molecules, but which do not interfere with binding of the NOVX protein to its target molecule, can be derivatized to the wells of the plate, and unbound target or NOVX protein trapped in the wells by antibody conjugation. Methods for detecting such complexes, in addition to those described above for the GST-immobilized complexes, include immunodetection of complexes using antibodies reactive with the NOVX protein or target molecule, as well as enzyme-linked assays that rely on detecting an enzymatic activity associated with the NOVX protein or target molecule.

[0577] In another embodiment, modulators of NOVX protein expression are identified in a method wherein a cell is contacted with a candidate compound and the expression of NOVX mRNA or protein in the cell is determined. The level of expression of NOVX mRNA or protein in the presence of the candidate compound is compared to the level of expression of NOVX mRNA or protein in the absence of the candidate compound. The candidate compound can then be identified as a modulator of NOVX mRNA or protein expression based upon this comparison. For example, when expression of NOVX mRNA or protein is greater (i.e., statistically significantly greater) in the presence of the candidate compound than in its absence, the candidate compound is identified as a stimulator of NOVX mRNA or protein expression. Alternatively, when expression of NOVX mRNA or protein is less (statistically significantly less) in the presence of the candidate compound than in its absence, the candidate compound is identified as an inhibitor of NOVX mRNA or protein expression. The level of NOVX mRNA or protein expression in the cells can be determined by methods described herein for detecting NOVX mRNA or protein.

[0578] In yet another aspect of the invention, the NOVX proteins can be used as “bait proteins” in a two-hybrid assay or three hybrid assay (see, e.g., U.S. Pat. No. 5,283,317; Zervos, et al., 1993. Cell 72: 223-232; Madura, et al., 1993. J. Biol. Chem. 268: 12046-12054; Bartel, et al., 1993. Biotechniques 14: 920-924; Iwabuchi, et al., 1993. Oncogene 8: 1693-1696; and Brent WO 94/10300), to identify other proteins that bind to or interact with NOVX (“NOVX-binding proteins” or “NOVX-bp”) and modulate NOVX activity. Such NOVX-binding proteins are also likely to be involved in the propagation of signals by the NOVX proteins as, for example, upstream or downstream elements of the NOVX pathway.

[0579] The two-hybrid system is based on the modular nature of most transcription factors, which consist of separable DNA-binding and activation domains. Briefly, the assay utilizes two different DNA constructs. In one construct, the gene that codes for NOVX is fused to a gene encoding the DNA binding domain of a known transcription factor (e.g. GAL4). In the other construct, a DNA sequence, from a library of DNA sequences, that encodes an unidentified protein (“prey” or “sample”) is fused to a gene that codes for the activation domain of the known transcription factor. If the “bait” and the “prey” proteins are able to interact, in vivo, forming an NOVX-dependent complex, the DNA-binding and activation domains of the transcription factor are brought into close proximity. This proximity allows transcription of a reporter gene (e.g., LacZ) that is operably linked to a transcriptional regulatory site responsive to the transcription factor. Expression of the reporter gene can be detected and cell colonies containing the functional transcription factor can be isolated and used to obtain the cloned gene that encodes the protein which interacts with NOVX.

[0580] The invention further pertains to novel agents identified by the aforementioned screening assays and uses thereof for treatments as described herein.

[0581] Detection Assays

[0582] Portions or fragments of the cDNA sequences identified herein (and the corresponding complete gene sequences) can be used in numerous ways as polynucleotide reagents. By way of example, and not of limitation, these sequences can be used to (i) map their respective genes on a chromosome; and, thus, locate gene regions associated with genetic disease; (ii) identify an individual from a minute biological sample (tissue typing); and (iii) aid in forensic identification of a biological sample. Some of these applications are described in the subsections, below.

[0583] Chromosome Mapping

[0584] Once the sequence (or a portion of the sequence) of a gene has been isolated, this sequence can be used to map the location of the gene on a chromosome. This process is called chromosome mapping. Accordingly, portions or fragments of the NOVX sequences, SEQ ID NOS: 1, 3, 5, 7, 9, 11, 13, 15, 17, 19, 21, 23, 25, 27, 29, 31, 33, 35, 37, 39, 41, 43, 45, 47, 49, 51, 53, 55, and 57, or fragments or derivatives thereof, can be used to map the location of the NOVX genes, respectively, on a chromosome. The mapping of the NOVX sequences to chromosomes is an important first step in correlating these sequences with genes associated with disease.

[0585] Briefly, NOVX genes can be mapped to chromosomes by preparing PCR primers (preferably 15-25 bp in length) from the NOVX sequences. Computer analysis of the NOVX, sequences can be used to rapidly select primers that do not span more than one exon in the genomic DNA, thus complicating the amplification process. These primers can then be used for PCR screening of somatic cell hybrids containing individual human chromosomes. Only those hybrids containing the human gene corresponding to the NOVX sequences will yield an amplified fragment.

[0586] Somatic cell hybrids are prepared by fusing somatic cells from different mammals (e.g., human and mouse cells). As hybrids of human and mouse cells grow and divide, they gradually lose human chromosomes in random order, but retain the mouse chromosomes. By using media in which mouse cells cannot grow, because they lack a particular enzyme, but in which human cells can, the one human chromosome that contains the gene encoding the needed enzyme will be retained. By using various media, panels of hybrid cell lines can be established. Each cell line in a panel contains either a single human chromosome or a small number of human chromosomes, and a full set of mouse chromosomes, allowing easy mapping of individual genes to specific human chromosomes. See, e.g., D'Eustachio, et al., 1983. Science 220: 919-924. Somatic cell hybrids containing only fragments of human chromosomes can also be produced by using human chromosomes with translocations and deletions.

[0587] PCR mapping of somatic cell hybrids is a rapid procedure for assigning a particular sequence to a particular chromosome. Three or more sequences can be assigned per day using a single thermal cycler. Using the NOVX sequences to design oligonucleotide primers, sub-localization can be achieved with panels of fragments from specific chromosomes.

[0588] Fluorescence in situ hybridization (FISH) of a DNA sequence to a metaphase chromosomal spread can further be used to provide a precise chromosomal location in one step. Chromosome spreads can be made using cells whose division has been blocked in metaphase by a chemical like colcemid that disrupts the mitotic spindle. The chromosomes can be treated briefly with trypsin, and then stained with Giemsa. A pattern of light and dark bands develops on each chromosome, so that the chromosomes can be identified individually. The FISH technique can be used with a DNA sequence as short as 500 or 600 bases. However, clones larger than 1,000 bases have a higher likelihood of binding to a unique chromosomal location with sufficient signal intensity for simple detection. Preferably 1,000 bases, and more preferably 2,000 bases, will suffice to get good results at a reasonable amount of time. For a review of this technique, see, Verma, et al., HUMAN CHROMOSOMES: A MANUAL OF BASIC TECHNIQUES (Pergamon Press, New York 1988).

[0589] Reagents for chromosome mapping can be used individually to mark a single chromosome or a single site on that chromosome, or panels of reagents can be used for marking multiple sites and/or multiple chromosomes. Reagents corresponding to noncoding regions of the genes actually are preferred for mapping purposes. Coding sequences are more likely to be conserved within gene families, thus increasing the chance of cross hybridizations during chromosomal mapping.

[0590] Once a sequence has been mapped to a precise chromosomal location, the physical position of the sequence on the chromosome can be correlated with genetic map data. Such data are found, e.g., in McKusick, MENDELIAN INHERITANCE IN MAN, available on-line through Johns Hopkins University Welch Medical Library). The relationship between genes and disease, mapped to the same chromosomal region, can then be identified through linkage analysis (co-inheritance of physically adjacent genes), described in, e.g., Egeland, et al., 1987. Nature, 325: 783-787.

[0591] Moreover, differences in the DNA sequences between individuals affected and unaffected with a disease associated with the NOVX gene, can be determined. If a mutation is observed in some or all of the affected individuals but not in any unaffected individuals, then the mutation is likely to be the causative agent of the particular disease. Comparison of affected and unaffected individuals generally involves first looking for structural alterations in the chromosomes, such as deletions or translocations that are visible from chromosome spreads or detectable using PCR based on that DNA sequence. Ultimately, complete sequencing of genes from several individuals can be performed to confirm the presence of a mutation and to distinguish mutations from polymorphisms.

[0592] Tissue Typing

[0593] The NOVX sequences of the invention can also be used to identify individuals from minute biological samples. In this technique, an individual's genomic DNA is digested with one or more restriction enzymes, and probed on a Southern blot to yield unique bands for identification. The sequences of the invention are useful as additional DNA markers for RFLP (“restriction fragment length polymorphisms,” described in U.S. Pat. No. 5,272,057).

[0594] Furthermore, the sequences of the invention can be used to provide an alternative technique that determines the actual base-by-base DNA sequence of selected portions of an individual's genome. Thus, the NOVX sequences described herein can be used to prepare two PCR primers from the 5′- and 3′-termini of the sequences. These primers can then be used to amplify an individual's DNA and subsequently sequence it.

[0595] Panels of corresponding DNA sequences from individuals, prepared in this manner, can provide unique individual identifications, as each individual will have a unique set of such DNA sequences due to allelic differences. The sequences of the invention can be used to obtain such identification sequences from individuals and from tissue. The NOVX sequences of the invention uniquely represent portions of the human genome. Allelic variation occurs to some degree in the coding regions of these sequences, and to a greater degree in the noncoding regions. It is estimated that allelic variation between individual humans occurs with a frequency of about once per each 500 bases. Much of the allelic variation is due to single nucleotide polymorphisms (SNPs), which include restriction fragment length polymorphisms (RFLPs).

[0596] Each of the sequences described herein can, to some degree, be used as a standard against which DNA from an individual can be compared for identification purposes. Because greater numbers of polymorphisms occur in the noncoding regions, fewer sequences are necessary to differentiate individuals. The noncoding sequences can comfortably provide positive individual identification with a panel of perhaps 10 to 1,000 primers that each yield a noncoding amplified sequence of 100 bases. If predicted coding sequences, such as those in SEQ ID NOS: 1, 3, 5, 7, 9, 11, 13, 15, 17, 19, 21, 23, 25, 27, 29, 31, 33, 35, 37, 39, 41, 43, 45, 47, 49, 51, 53, 55, and 57 are used, a more appropriate number of primers for positive individual identification would be 500-2,000.

[0597] Predictive Medicine

[0598] The invention also pertains to the field of predictive medicine in which diagnostic assays, prognostic assays, pharmacogenomics, and monitoring clinical trials are used for prognostic (predictive) purposes to thereby treat an individual prophylactically. Accordingly, one aspect of the invention relates to diagnostic assays for determining NOVX protein and/or nucleic acid expression as well as NOVX activity, in the context of a biological sample (e.g., blood, serum, cells, tissue) to thereby determine whether an individual is afflicted with a disease or disorder, or is at risk of developing a disorder, associated with aberrant NOVX expression or activity. The disorders include metabolic disorders, diabetes, obesity, infectious disease, anorexia, cancer-associated cachexia, cancer, neurodegenerative disorders, Alzheimer's Disease, Parkinson's Disorder, immune disorders, and hematopoietic disorders, and the various dyslipidemias, metabolic disturbances associated with obesity, the metabolic syndrome X and wasting disorders associated with chronic diseases and various cancers. The invention also provides for prognostic (or predictive) assays for determining whether an individual is at risk of developing a disorder associated with NOVX protein, nucleic acid expression or activity. For example, mutations in an NOVX gene can be assayed in a biological sample. Such assays can be used for prognostic or predictive purpose to thereby prophylactically treat an individual prior to the onset of a disorder characterized by or associated with NOVX protein, nucleic acid expression, or biological activity.

[0599] Another aspect of the invention provides methods for determining NOVX protein, nucleic acid expression or activity in an individual to thereby select appropriate therapeutic or prophylactic agents for that individual (referred to herein as “pharmacogenomics”). Pharmacogenomics allows for the selection of agents (e.g., drugs) for therapeutic or prophylactic treatment of an individual based on the genotype of the individual (e.g., the genotype of the individual examined to determine the ability of the individual to respond to a particular agent.)

[0600] Yet another aspect of the invention pertains to monitoring the influence of agents (e.g., drugs, compounds) on the expression or activity of NOVX in clinical trials.

[0601] These and other agents are described in further detail in the following sections.

[0602] Diagnostic Assays

[0603] An exemplary method for detecting the presence or absence of NOVX in a biological sample involves obtaining a biological sample from a test subject and contacting the biological sample with a compound or an agent capable of detecting NOVX protein or nucleic acid (e.g., mRNA, genomic DNA) that encodes NOVX protein such that the presence of NOVX is detected in the biological sample. An agent for detecting NOVX mRNA or genomic DNA is a labeled nucleic acid probe capable of hybridizing to NOVX mRNA or genomic DNA. The nucleic acid probe can be, for example, a full-length NOVX nucleic acid, such as the nucleic acid of SEQ ID NOS: 1, 3, 5, 7, 9, 11, 13, 15, 17, 19, 21, 23, 25, 27, 29, 31, 33, 35, 37, 39, 41, 43, 45, 47, 49, 51, 53, 55, and 57, or a portion thereof, such as an oligonucleotide of at least 15, 30, 50, 100, 250 or 500 nucleotides in length and sufficient to specifically hybridize under stringent conditions to NOVX mRNA or genomic DNA. Other suitable probes for use in the diagnostic assays of the invention are described herein.

[0604] An agent for detecting NOVX protein is an antibody capable of binding to NOVX protein, preferably an antibody with a detectable label. Antibodies can be polyclonal, or more preferably, monoclonal. An intact antibody, or a fragment thereof (e.g., Fab or F(ab′)₂) can be used. The term “labeled”, with regard to the probe or antibody, is intended to encompass direct labeling of the probe or antibody by coupling (i.e., physically linking) a detectable substance to the probe or antibody, as well as indirect labeling of the probe or antibody by reactivity with another reagent that is directly labeled. Examples of indirect labeling include detection of a primary antibody using a fluorescently-labeled secondary antibody and end-labeling of a DNA probe with biotin such that it can be detected with fluorescently-labeled streptavidin. The term “biological sample” is intended to include tissues, cells and biological fluids isolated from a subject, as well as tissues, cells and fluids present within a subject. That is, the detection method of the invention can be used to detect NOVX mRNA, protein, or genomic DNA in a biological sample in vitro as well as in vivo. For example, in vitro techniques for detection of NOVX mRNA include Northern hybridizations and in situ hybridizations. In vitro techniques for detection of NOVX protein include enzyme linked immunosorbent assays (ELISAs), Western blots, immunoprecipitations, and immunofluorescence. In vitro techniques for detection of NOVX genomic DNA include Southern hybridizations. Furthermore, in vivo techniques for detection of NOVX protein include introducing into a subject a labeled anti-NOVX antibody. For example, the antibody can be labeled with a radioactive marker whose presence and location in a subject can be detected by standard imaging techniques.

[0605] In one embodiment, the biological sample contains protein molecules from the test subject. Alternatively, the biological sample can contain mRNA molecules from the test subject or genomic DNA molecules from the test subject. A preferred biological sample is a peripheral blood leukocyte sample isolated by conventional means from a subject.

[0606] In another embodiment, the methods further involve obtaining a control biological sample from a control subject, contacting the control sample with a compound or agent capable of detecting NOVX protein, mRNA, or genomic DNA, such that the presence of NOVX protein, mRNA or genomic DNA is detected in the biological sample, and comparing the presence of NOVX protein, mRNA or genomic DNA in the control sample with the presence of NOVX protein, mRNA or genomic DNA in the test sample.

[0607] The invention also encompasses kits for detecting the presence of NOVX in a biological sample. For example, the kit can comprise: a labeled compound or agent capable of detecting NOVX protein or mRNA in a biological sample; means for determining the amount of NOVX in the sample; and means for comparing the amount of NOVX in the sample with a standard. The compound or agent can be packaged in a suitable container. The kit can further comprise instructions for using the kit to detect NOVX protein or nucleic acid.

[0608] Prognostic Assays

[0609] The diagnostic methods described herein can furthermore be utilized to identify subjects having or at risk of developing a disease or disorder associated with aberrant NOVX expression or activity. For example, the assays described herein, such as the preceding diagnostic assays or the following assays, can be utilized to identify a subject having or at risk of developing a disorder associated with NOVX protein, nucleic acid expression or activity. Alternatively, the prognostic assays can be utilized to identify a subject having or at risk for developing a disease or disorder. Thus, the invention provides a method for identifying a disease or disorder associated with aberrant NOVX expression or activity in which a test sample is obtained from a subject and NOVX protein or nucleic acid (e.g., mRNA, genomic DNA) is detected, wherein the presence of NOVX protein or nucleic acid is diagnostic for a subject having or at risk of developing a disease or disorder associated with aberrant NOVX expression or activity. As used herein, a “test sample” refers to a biological sample obtained from a subject of interest. For example, a test sample can be a biological fluid (e.g., serum), cell sample, or tissue.

[0610] Furthermore, the prognostic assays described herein can be used to determine whether a subject can be administered an agent (e.g., an agonist, antagonist, peptidomimetic, protein, peptide, nucleic acid, small molecule, or other drug candidate) to treat a disease or disorder associated with aberrant NOVX expression or activity. For example, such methods can be used to determine whether a subject can be effectively treated with an agent for a disorder. Thus, the invention provides methods for determining whether a subject can be effectively treated with an agent for a disorder associated with aberrant NOVX expression or activity in which a test sample is obtained and NOVX protein or nucleic acid is detected (e.g., wherein the presence of NOVX protein or nucleic acid is diagnostic for a subject that can be administered the agent to treat a disorder associated with aberrant NOVX expression or activity).

[0611] The methods of the invention can also be used to detect genetic lesions in an NOVX gene, thereby determining if a subject with the lesioned gene is at risk for a disorder characterized by aberrant cell proliferation and/or differentiation. In various embodiments, the methods include detecting, in a sample of cells from the subject, the presence or absence of a genetic lesion characterized by at least one of an alteration affecting the integrity of a gene encoding an NOVX-protein, or the misexpression of the NOVX gene. For example, such genetic lesions can be detected by ascertaining the existence of at least one of: (i) a deletion of one or more nucleotides from an NOVX gene; (ii) an addition of one or more nucleotides to an NOVX gene; (iii) a substitution of one or more nucleotides of an NOVX gene, (iv) a chromosomal rearrangement of an NOVX gene; (v) an alteration in the level of a messenger RNA transcript of an NOVX gene, (vi) aberrant modification of an NOVX gene, such as of the methylation pattern of the genomic DNA, (vii) the presence of a non-wild-type splicing pattern of a messenger RNA transcript of an NOVX gene, (viii) a non-wild-type level of an NOVX protein, (ix) allelic loss of an NOVX gene, and (x) inappropriate post-translational modification of an NOVX protein. As described herein, there are a large number of assay techniques known in the art which can be used for detecting lesions in an NOVX gene. A preferred biological sample is a peripheral blood leukocyte sample isolated by conventional means from a subject. However, any biological sample containing nucleated cells may be used, including, for example, buccal mucosal cells.

[0612] In certain embodiments, detection of the lesion involves the use of a probe/primer in a polymerase chain reaction (PCR) (see, e.g., U.S. Pat. Nos. 4,683,195 and 4,683,202), such as anchor PCR or RACE PCR, or, alternatively, in a ligation chain reaction (LCR) (see, e.g., Landegran, et al., 1988. Science 241: 1077-1080; and Nakazawa, et al., 1994. Proc. Natl. Acad. Sci. USA 91: 360-364), the latter of which can be particularly useful for detecting point mutations in the NOVX-gene (see, Abravaya, et al., 1995. Nucl. Acids Res. 23: 675-682). This method can include the steps of collecting a sample of cells from a patient, isolating nucleic acid (eg., genomic, mRNA or both) from the cells of the sample, contacting the nucleic acid sample with one or more primers that specifically hybridize to an NOVX gene under conditions such that hybridization and amplification of the NOVX gene (if present) occurs, and detecting the presence or absence of an amplification product, or detecting the size of the amplification product and comparing the length to a control sample. It is anticipated that PCR and/or LCR may be desirable to use as a preliminary amplification step in conjunction with any of the techniques used for detecting mutations described herein.

[0613] Alternative amplification methods include: self sustained sequence replication (see, Guatelli, et al., 1990. Proc. Natl. Acad. Sci. USA 87: 1874-1878), transcriptional amplification system (see, Kwoh, et al., 1989. Proc. Natl. Acad. Sci. USA 86: 1173-1177); Qβ Replicase (see, Lizardi, et al, 1988. BioTechnology 6: 1197), or any other nucleic acid amplification method, followed by the detection of the amplified molecules using techniques well known to those of skill in the art. These detection schemes are especially useful for the detection of nucleic acid molecules if such molecules are present in very low numbers.

[0614] In an alternative embodiment, mutations in an NOVX gene from a sample cell can be identified by alterations in restriction enzyme cleavage patterns. For example, sample and control DNA is isolated, amplified (optionally), digested with one or more restriction endonucleases, and fragment length sizes are determined by gel electrophoresis and compared. Differences in fragment length sizes between sample and control DNA indicates mutations in the sample DNA. Moreover, the use of sequence specific ribozymes (see, e.g., U.S. Pat. No. 5,493,531) can be used to score for the presence of specific mutations by development or loss of a ribozyme cleavage site.

[0615] In other embodiments, genetic mutations in NOVX can be identified by hybridizing a sample and control nucleic acids, eg., DNA or RNA, to high-density arrays containing hundreds or thousands of oligonucleotides probes. See, e.g. Cronin, et al., 1996. Human Mutation 7: 244-255; Kozal, et al., 1996. Nat. Med. 2: 753-759. For example, genetic mutations in NOVX can be identified in two dimensional arrays containing light-generated DNA probes as described in Cronin, et al., supra. Briefly, a first hybridization array of probes can be used to scan through long stretches of DNA in a sample and control to identify base changes between the sequences by making linear arrays of sequential overlapping probes. This step allows the identification of point mutations. This is followed by a second hybridization array that allows the characterization of specific mutations by using smaller, specialized probe arrays complementary to all variants or mutations detected. Each mutation array is composed of parallel probe sets, one complementary to the wild-type gene and the other complementary to the mutant gene.

[0616] In yet another embodiment, any of a variety of sequencing reactions known in the art can be used to directly sequence the NOVX gene and detect mutations by comparing the sequence of the sample NOVX with the corresponding wild-type (control) sequence. Examples of sequencing reactions include those based on techniques developed by Maxim and Gilbert, 1977. Proc. Natl. Acad. Sci. USA 74: 560 or Sanger, 1977. Proc. Natl. Acad. Sci. USA 74: 5463. It is also contemplated that any of a variety of automated sequencing procedures can be utilized when performing the diagnostic assays (see, e.g., Naeve, et al., 1995. Biotechniques 19: 448), including sequencing by mass spectrometry (see, e.g., PCT International Publication No. WO 94/16101; Cohen, et al., 1996. Adv. Chromatography 36: 127-162; and Griffin, et al., 1993. Appl. Biochem. Biotechnol. 38: 147-159).

[0617] Other methods for detecting mutations in the NOVX gene include methods in which protection from cleavage agents is used to detect mismatched bases in RNA/RNA or RNA/DNA heteroduplexes. See, e.g., Myers, et al., 1985. Science 230: 1242. In general, the art technique of “mismatch cleavage” starts by providing heteroduplexes of formed by hybridizing (labeled) RNA or DNA containing the wild-type NOVX sequence with potentially mutant RNA or DNA obtained from a tissue sample. The double-stranded duplexes are treated with an agent that cleaves single-stranded regions of the duplex such as which will exist due to basepair mismatches between the control and sample strands. For instance, RNA/DNA duplexes can be treated with RNase and DNA/DNA hybrids treated with S₁ nuclease to enzymatically digesting the mismatched regions. In other embodiments, either DNA/DNA or RNA/DNA duplexes can be treated with hydroxylamine or osmium tetroxide and with piperidine in order to digest mismatched regions. After digestion of the mismatched regions, the resulting material is then separated by size on denaturing polyacrylamide gels to determine the site of mutation. See, e.g., Cotton, et al., 1988. Proc. Natl. Acad. Sci. USA 85: 4397; Saleeba, et al., 1992. Methods Enzymol. 217: 286-295. In an embodiment, the control DNA or RNA can be labeled for detection.

[0618] In still another embodiment, the mismatch cleavage reaction employs one or more proteins that recognize mismatched base pairs in double-stranded DNA (so called “DNA mismatch repair” enzymes) in defined systems for detecting and mapping point mutations in NOVX cDNAs obtained from samples of cells. For example, the mutY enzyme of E. coli cleaves A at G/A mismatches and the thymidine DNA glycosylase from HeLa cells cleaves T at G/T mismatches. See, e.g., Hsu, et al., 1994. Carcinogenesis 15: 1657-1662. According to an exemplary embodiment, a probe based on an NOVX sequence, e.g., a wild-type NOVX sequence, is hybridized to a cDNA or other DNA product from a test cell(s). The duplex is treated with a DNA mismatch repair enzyme, and the cleavage products, if any, can be detected from electrophoresis protocols or the like. See, e.g., U.S. Pat. No. 5,459,039.

[0619] In other embodiments, alterations in electrophoretic mobility will be used to identify mutations in NOVX genes. For example, single strand conformation polymorphism (SSCP) may be used to detect differences in electrophoretic mobility between mutant and wild type nucleic acids. See, e.g., Orita, et al., 1989. Proc. Natl. Acad. Sci. USA: 86: 2766; Cotton, 1993. Mutat. Res. 285: 125-144; Hayashi, 1992. Genet. Anal. Tech. Appl. 9: 73-79. Single-stranded DNA fragments of sample and control NOVX nucleic acids will be denatured and allowed to renature. The secondary structure of single-stranded nucleic acids varies according to sequence, the resulting alteration in electrophoretic mobility enables the detection of even a single base change. The DNA fragments may be labeled or detected with labeled probes. The sensitivity of the assay may be enhanced by using RNA (rather than DNA), in which the secondary structure is more sensitive to a change in sequence. In one embodiment, the subject method utilizes heteroduplex analysis to separate double stranded heteroduplex molecules on the basis of changes in electrophoretic mobility. See, e.g., Keen, et al., 1991. Trends Genet. 7: 5.

[0620] In yet another embodiment, the movement of mutant or wild-type fragments in polyacrylamide gels containing a gradient of denaturant is assayed using denaturing gradient gel electrophoresis (DGGE). See, e.g., Myers, et al., 1985. Nature 313: 495. When DGGE is used as the method of analysis, DNA will be modified to insure that it does not completely denature, for example by adding a GC clamp of approximately 40 bp of high-melting GC-rich DNA by PCR. In a further embodiment, a temperature gradient is used in place of a denaturing gradient to identify differences in the mobility of control and sample DNA. See, e.g., Rosenbaum and Reissner, 1987. Biophys. Chem. 265: 12753.

[0621] Examples of other techniques for detecting point mutations include, but are not limited to, selective oligonucleotide hybridization, selective amplification, or selective primer extension. For example, oligonucleotide primers may be prepared in which the known mutation is placed centrally and then hybridized to target DNA under conditions that permit hybridization only if a perfect match is found. See, e.g., Saiki, et al., 1986. Nature 324: 163; Saiki, et al., 1989. Proc. Natl. Acad. Sci. USA 86: 6230. Such allele specific oligonucleotides are hybridized to PCR amplified target DNA or a number of different mutations when the oligonucleotides are attached to the hybridizing membrane and hybridized with labeled target DNA.

[0622] Alternatively, allele specific amplification technology that depends on selective PCR amplification may be used in conjunction with the instant invention. Oligonucleotides used as primers for specific amplification may carry the mutation of interest in the center of the molecule (so that amplification depends on differential hybridization; see, e.g., Gibbs, et al., 1989. Nucl. Acids Res. 17: 2437-2448) or at the extreme 3′-terminus of one primer where, under appropriate conditions, mismatch can prevent, or reduce polymerase extension (see, e.g., Prossner, 1993. Tibtech. 11: 238). In addition it may be desirable to introduce a novel restriction site in the region of the mutation to create cleavage-based detection. See, e.g., Gasparini, et al., 1992. Mol. Cell Probes 6: 1. It is anticipated that in certain embodiments amplification may also be performed using Taq ligase for amplification. See, e.g., Barany, 1991. Proc. Natl. Acad. Sci. USA 88: 189. In such cases, ligation will occur only if there is a perfect match at the 3′-terminus of the 5′ sequence, making it possible to detect the presence of a known mutation at a specific site by looking for the presence or absence of amplification.

[0623] The methods described herein may be performed, for example, by utilizing pre-packaged diagnostic kits comprising at least one probe nucleic acid or antibody reagent described herein, which may be conveniently used, e.g., in clinical settings to diagnose patients exhibiting symptoms or family history of a disease or illness involving an NOVX gene.

[0624] Furthermore, any cell type or tissue, preferably peripheral blood leukocytes, in which NOVX is expressed may be utilized in the prognostic assays described herein. However, any biological sample containing nucleated cells may be used, including, for example, buccal mucosal cells.

[0625] Pharmacogenomics

[0626] Agents, or modulators that have a stimulatory or inhibitory effect on NOVX activity (e.g., NOVX gene expression), as identified by a screening assay described herein can be administered to individuals to treat (prophylactically or therapeutically) disorders (The disorders include metabolic disorders, diabetes, obesity, infectious disease, anorexia, cancer-associated cachexia, cancer, neurodegenerative disorders, Alzheimer's Disease, Parkinson's Disorder, immune disorders, and hematopoietic disorders, and the various dyslipidemias, metabolic disturbances associated with obesity, the metabolic syndrome X and wasting disorders associated with chronic diseases and various cancers.) In conjunction with such treatment, the pbarmacogenomics (i.e., the study of the relationship between an individual's genotype and that individual's response to a foreign compound or drug) of the individual may be considered. Differences in metabolism of therapeutics can lead to severe toxicity or therapeutic failure by altering the relation between dose and blood concentration of the pharmacologically active drug. Thus, the pharmacogenomics of the individual permits the selection of effective agents (e.g., drugs) for prophylactic or therapeutic treatments based on a consideration of the individual's genotype. Such pharmacogenomics can further be used to determine appropriate dosages and therapeutic regimens. Accordingly, the activity of NOVX protein, expression of NOVX nucleic acid, or mutation content of NOVX genes in an individual can be determined to thereby select appropriate agent(s) for therapeutic or prophylactic treatment of the individual.

[0627] Pharmacogenomics deals with clinically significant hereditary variations in the response to drugs due to altered drug disposition and abnormal action in affected persons. See e.g., Eichelbaum, 1996. Clin. Exp. Pharmacol. Physiol., 23: 983-985; Linder, 1997. Clin. Chem., 43: 254-266. In general, two types of pharmacogenetic conditions can be differentiated. Genetic conditions transmitted as a single factor altering the way drugs act on the body (altered drug action) or genetic conditions transmitted as single factors altering the way the body acts on drugs (altered drug metabolism). These pharmacogenetic conditions can occur either as rare defects or as polymorphisms. For example, glucose-6-phosphate dehydrogenase (G6PD) deficiency is a common inherited enzymopathy in which the main clinical complication is hemolysis after ingestion of oxidant drugs (anti-malarials, sulfonamides, analgesics, nitrofurans) and consumption of fava beans.

[0628] As an illustrative embodiment, the activity of drug metabolizing enzymes is a major determinant of both the intensity and duration of drug action. The discovery of genetic polymorphisms of drug metabolizing enzymes (e.g., N-acetyltransferase 2 (NAT 2) and cytochrome P450 enzymes CYP2D6 and CYP2C19) has provided an explanation as to why some patients do not obtain the expected drug effects or show exaggerated drug response and serious toxicity after taking the standard and safe dose of a drug. These polymorphisms are expressed in two phenotypes in the population, the extensive metabolizer (EM) and poor metabolizer (PM). The prevalence of PM is different among different populations. For example, the gene coding for CYP2D6 is highly polymorphic and several mutations have been identified in PM, which all lead to the absence of functional CYP2D6. Poor metabolizers of CYP2D6 and CYP2C 19 quite frequently experience exaggerated drug response and side effects when they receive standard doses. If a metabolite is the active therapeutic moiety, PM show no therapeutic response, as demonstrated for the analgesic effect of codeine mediated by its CYP2D6-formed metabolite morphine. At the other extreme are the so called ultra-rapid metabolizers who do not respond to standard doses. Recently, the molecular basis of ultra-rapid metabolism has been identified to be due to CYP2D6 gene amplification.

[0629] Thus, the activity of NOVX protein, expression of NOVX nucleic acid, or mutation content of NOVX genes in an individual can be determined to thereby select appropriate agent(s) for therapeutic or prophylactic treatment of the individual. In addition, pharmacogenetic studies can be used to apply genotyping of polymorphic alleles encoding drug-metabolizing enzymes to the identification of an individual's drug responsiveness phenotype. This knowledge, when applied to dosing or drug selection, can avoid adverse reactions or therapeutic failure and thus enhance therapeutic or prophylactic efficiency when treating a subject with an NOVX modulator, such as a modulator identified by one of the exemplary screening assays described herein.

[0630] Monitoring of Effects During Clinical Trials

[0631] Monitoring the influence of agents (e.g., drugs, compounds) on the expression or activity of NOVX (e.g., the ability to modulate aberrant cell proliferation and/or differentiation) can be applied not only in basic drug screening, but also in clinical trials. For example, the effectiveness of an agent determined by a screening assay as described herein to increase NOVX gene expression, protein levels, or upregulate NOVX activity, can be monitored in clinical trails of subjects exhibiting decreased NOVX gene expression, protein levels, or downregulated NOVX activity. Alternatively, the effectiveness of an agent determined by a screening assay to decrease NOVX gene expression, protein levels, or downregulate NOVX activity, can be monitored in clinical trails of subjects exhibiting increased NOVX gene expression, protein levels, or upregulated NOVX activity. In such clinical trials, the expression or activity of NOVX and, preferably, other genes that have been implicated in, for example, a cellular proliferation or immune disorder can be used as a “read out” or markers of the immune responsiveness of a particular cell.

[0632] By way of example, and not of limitation, genes, including NOVX, that are modulated in cells by treatment with an agent (e.g., compound, drug or small molecule) that modulates NOVX activity (e.g., identified in a screening assay as described herein) can be identified. Thus, to study the effect of agents on cellular proliferation disorders, for example, in a clinical trial, cells can be isolated and RNA prepared and analyzed for the levels of expression of NOVX and other genes implicated in the disorder. The levels of gene expression (i.e., a gene expression pattern) can be quantified by Northern blot analysis or RT-PCR, as described herein, or alternatively by measuring the amount of protein produced, by one of the methods as described herein, or by measuring the levels of activity of NOVX or other genes. In this manner, the gene expression pattern can serve as a marker, indicative of the physiological response of the cells to the agent. Accordingly, this response state may be determined before, and at various points during, treatment of the individual with the agent.

[0633] In one embodiment, the invention provides a method for monitoring the effectiveness of treatment of a subject with an agent (e.g., an agonist, antagonist, protein, peptide, peptidomimetic, nucleic acid, small molecule, or other drug candidate identified by the screening assays described herein) comprising the steps of (i) obtaining a pre-administration sample from a subject prior to administration of the agent; (ii) detecting the level of expression of an NOVX protein, mRNA, or genomic DNA in the preadministration sample; (iii) obtaining one or more post-administration samples from the subject; (iv) detecting the level of expression or activity of the NOVX protein, mRNA, or genomic DNA in the post-administration samples; (v) comparing the level of expression or activity of the NOVX protein, mRNA, or genomic DNA in the pre-administration sample with the NOVX protein, mRNA, or genomic DNA in the post administration sample or samples; and (vi) altering the administration of the agent to the subject accordingly. For example, increased administration of the agent may be desirable to increase the expression or activity of NOVX to higher levels than detected, i.e., to increase the effectiveness of the agent. Alternatively, decreased administration of the agent may be desirable to decrease expression or activity of NOVX to lower levels than detected, i.e., to decrease the effectiveness of the agent.

[0634] Methods of Treatment

[0635] The invention provides for both prophylactic and therapeutic methods of treating a subject at risk of (or susceptible to) a disorder or having a disorder associated with aberrant NOVX expression or activity. The disorders include cardiomyopathy, atherosclerosis, hypertension, congenital heart defects, aortic stenosis, atrial septal defect (ASD), atrioventricular (A-V) canal defect, ductus arteriosus, pulmonary stenosis, subaortic stenosis, ventricular septal defect (VSD), valve diseases, tuberous sclerosis, scleroderma, obesity, transplantation, adrenoleukodystrophy, congenital adrenal hyperplasia, prostate cancer, neoplasm; adenocarcinoma, lymphoma, uterus cancer, fertility, hemophilia, hypercoagulation, idiopathic thrombocytopenic purpura, immunodeficiencies, graft versus host disease, AIDS, bronchial asthma, Crohn's disease; multiple sclerosis, treatment of Albright Hereditary Ostoeodystrophy, and other diseases, disorders and conditions of the like.

[0636] These methods of treatment will be discussed more fully, below.

[0637] Disease and Disorders

[0638] Diseases and disorders that are characterized by increased (relative to a subject not suffering from the disease or disorder) levels or biological activity may be treated with Therapeutics that antagonize (i.e., reduce or inhibit) activity. Therapeutics that antagonize activity may be administered in a therapeutic or prophylactic manner. Therapeutics that may be utilized include, but are not limited to: (i) an aforementioned peptide, or analogs, derivatives, fragments or homologs thereof; (ii) antibodies to an aforementioned peptide; (iii) nucleic acids encoding an aforementioned peptide; (iv) administration of antisense nucleic acid and nucleic acids that are “dysfunctional” (i.e., due to a heterologous insertion within the coding sequences of coding sequences to an aforementioned peptide) that are utilized to “knockout” endogenous function of an aforementioned peptide by homologous recombination (see, e.g., Capecchi, 1989. Science 244: 1288-1292); or (v) modulators (i.e., inhibitors, agonists and antagonists, including additional peptide mimetic of the invention or antibodies specific to a peptide of the invention) that alter the interaction between an aforementioned peptide and its binding partner.

[0639] Diseases and disorders that are characterized by decreased (relative to a subject not suffering from the disease or disorder) levels or biological activity may be treated with Therapeutics that increase (i.e., are agonists to) activity. Therapeutics that upregulate activity may be administered in a therapeutic or prophylactic manner. Therapeutics that may be utilized include, but are not limited to, an aforementioned peptide, or analogs, derivatives, fragments or homologs thereof; or an agonist that increases bioavailability.

[0640] Increased or decreased levels can be readily detected by quantifying peptide and/or RNA, by obtaining a patient tissue sample (e.g., from biopsy tissue) and assaying it in vitro for RNA or peptide levels, structure and/or activity of the expressed peptides (or mRNAs of an aforementioned peptide). Methods that are well-known within the art include, but are not limited to, immunoassays (e.g., by Western blot analysis, immunoprecipitation followed by sodium dodecyl sulfate (SDS) polyacrylamide gel electrophoresis, immunocytochemistry, etc.) and/or hybridization assays to detect expression of mRNAs (e.g., Northern assays, dot blots, in situ hybridization, and the like).

[0641] Prophylactic Methods

[0642] In one aspect, the invention provides a method for preventing, in a subject, a disease or condition associated with an aberrant NOVX expression or activity, by administering to the subject an agent that modulates NOVX expression or at least one NOVX activity. Subjects at risk for a disease that is caused or contributed to by aberrant NOYX expression or activity can be identified by, for example, any or a combination of diagnostic or prognostic assays as described herein. Administration of a prophylactic agent can occur prior to the manifestation of symptoms characteristic of the NQVX aberrancy, such that a disease or disorder is prevented or, alternatively, delayed in its progression. Depending upon the type of NOVX aberrancy, for example, an NOVX agonist or NOVX antagonist agent can be used for treating the subject. The appropriate agent can be determined based on screening assays described herein. The prophylactic methods of the invention are further discussed in the following subsections.

[0643] Therapeutic Methods

[0644] Another aspect of the invention pertains to methods of modulating NOVX expression or activity for therapeutic purposes. The modulatory method of the invention involves contacting a cell with an agent that modulates one or more of the activities of NOVX protein activity associated with the cell. An agent that modulates NOVX protein activity can be an agent as described herein, such as a nucleic acid or a protein, a naturally-occurring cognate ligand of an NOVX protein, a peptide, an NOVX peptidomimetic, or other small molecule. In one embodiment, the agent stimulates one or more NOVX protein activity. Examples of such stimulatory agents include active NOVX protein and a nucleic acid molecule encoding NOVX that has been introduced into the cell. In another embodiment, the agent inhibits one or more NOVX protein activity. Examples of such inhibitory agents include antisense NOVX nucleic acid molecules and anti-NOVX antibodies. These modulatory methods can be performed in vitro (e.g., by culturing the cell with the agent) or, alternatively, in vivo (e.g., by administering the agent to a subject). As such, the invention provides methods of treating an individual afflicted with a disease or disorder characterized by aberrant expression or activity of an NOVX protein or nucleic acid molecule. In one embodiment, the method involves administering an agent (e.g., an agent identified by a screening assay described herein), or combination of agents that modulates (e.g., up-regulates or down-regulates) NOVX expression or activity. In another embodiment, the method involves administering an NOVX protein or nucleic acid molecule as therapy to compensate for reduced or aberrant NOVX expression or activity.

[0645] Stimulation of NOVX activity is desirable in situations in which NOVX is abnormally downregulated and/or in which increased NOVX activity is likely to have a beneficial effect. One example of such a situation is where a subject has a disorder characterized by aberrant cell proliferation and/or differentiation (e.g., cancer or immune associated disorders). Another example of such a situation is where the subject has a gestational disease (e.g., preclampsia).

[0646] Determination of the Biological Effect of the Therapeutic

[0647] In various embodiments of the invention, suitable in vitro or in vivo assays are performed to determine the effect of a specific Therapeutic and whether its administration is indicated for treatment of the affected tissue.

[0648] In various specific embodiments, in vitro assays may be performed with representative cells of the type(s) involved in the patient's disorder, to determine if a given Therapeutic exerts the desired effect upon the cell type(s). Compounds for use in therapy may be tested in suitable animal model systems including, but not limited to rats, mice, chicken, cows, monkeys, rabbits, and the like, prior to testing in human subjects. Similarly, for in vivo testing, any of the animal model system known in the art may be used prior to administration to human subjects.

[0649] Prophylactic and Therapeutic Uses of the Compositions of the Invention

[0650] The NOVX nucleic acids and proteins of the invention are useful in potential prophylactic and therapeutic applications implicated in a variety of disorders including, but not limited to: metabolic disorders, diabetes, obesity, infectious disease, anorexia, cancer-associated cancer, neurodegenerative disorders, Alzheimer's Disease, Parkinson's Disorder, immune disorders, hematopoietic disorders, and the various dyslipidemias, metabolic disturbances associated with obesity, the metabolic syndrome X and wasting disorders associated with chronic diseases and various cancers.

[0651] As an example, a cDNA encoding the NOVX protein of the invention may be useful in gene therapy, and the protein may be useful when administered to a subject in need thereof. By way of non-limiting example, the compositions of the invention will have efficacy for treatment of patients suffering from: metabolic disorders, diabetes, obesity, infectious disease, anorexia, cancer-associated cachexia, cancer, neurodegenerative disorders, Alzheimer's Disease, Parkinson's Disorder, immune disorders, hematopoietic disorders, and the various dyslipidemias.

[0652] Both the novel nucleic acid encoding the NOVX protein, and the NOVX protein of the invention, or fragments thereof, may also be useful in diagnostic applications, wherein the presence or amount of the nucleic acid or the protein are to be assessed. A further use could be as an anti-bacterial molecule (i.e., some peptides have been found to possess anti-bacterial properties). These materials are further useful in the generation of antibodies, which immunospecifically-bind to the novel substances of the invention for use in therapeutic or diagnostic methods.

[0653] The invention will be further described in the following examples, which do not limit the scope of the invention described in the claims.

### EXAMPLES

### Example 1

[0654] Identification of NOVX Clones

[0655] The novel NOVX target sequences identified in the present invention were subjected to the exon linking process to confirm the sequence. PCR primers were designed by starting at the most upstream sequence available, for the forward primer, and at the most downstream sequence available for the reverse primer. Table 14A shows the sequences of the PCR primers used for obtaining different clones. In each case, the sequence was examined, walking inward from the respective termini toward the coding sequence, until a suitable sequence that is either unique or highly selective was encountered, or, in the case of the reverse primer, until the stop codon was reached. Such primers were designed based on in silico predictions for the full length cDNA, part (one or more exons) of the DNA or protein sequence of the target sequence, or by translated homology of the predicted exons to closely related human sequences from other species. These primers were then employed in PCR amplification based on the following pool of human cDNAs: adrenal gland, bone marrow, brain—amygdala, brain—cerebellum, brain—hippocampus, brain—substantia nigra, brain—thalamus, brain—whole, fetal brain, fetal kidney, fetal liver, fetal lung, heart, kidney, lymphoma—Raji, mammary gland, pancreas, pituitary gland, placenta, prostate, salivary gland, skeletal muscle, small intestine, spinal cord, spleen, stomach, testis, thyroid, trachea, uterus. Usually the resulting amplicons were gel purified, cloned and sequenced to high redundancy. The PCR product derived from exon linking was cloned into the pCR2.1 vector from Invitrogen. The resulting bacterial clone has an insert covering the entire open reading frame cloned into the pCR2.1 vector. Table 14B shows a list of these bacterial clones. The resulting sequences from all clones were assembled with themselves, with other fragments in CuraGen Corporation's database and with public ESTs. Fragments and ESTs were included as components for an assembly when the extent of their identity with another component of the assembly was at least 95% over 50 bp. In addition, sequence traces were evaluated manually and edited for corrections if appropriate. These procedures provide the sequence reported herein.

TABLE 14A
PCR Primers for Exoii Linking

| | | SEQ | | SEQ |
|---|---|---|---|---|
| NOVX | | ID | | ID |
| Clone | Primer 1 (5′-3′) | NO | Primer 2 (5′-3′) | NO |
| NOV3a | AGCACGCACTTGCCCAGAGCTATC | 138 | CCTATGGCTGAAGGCCGAGGT | 139 |
| NOV3b | CTGGGTCTCCCCTCCCAC | 140 | GTTTATTCTGAGCACCGGGAA | 141 |
| NOV4a | AGCACGCACTTGCCCAGAGCTATC | 142 | CATTTGCTGTCTCCTCTGCTCACCAG | 143 |
| NOV4b | ATGACGCCCGATCTGCTCAACTTCA | 144 | GTCCAGCGAGTCCCGGGTGTG | 145 |
| NOV5 | GCTTCTCCGAGCCCGAATACTC | 146 | CTCGAGGCCATTCACGAGTTGT | 147 |
| NOV6a | GTTTGGGGATGTGGTCCTTGCT | 148 | CTCACCTGCGGTCCGGTAG | 149 |
| NOV6b | GTTTGGGGATGTGGTCCTTGCT | 150 | CTCACCTGCGGTGCGGTAG | 151 |
| NOV6c | GTTTGGGGATGTGGTCCTTGCT | 152 | CTCACCTGCGCTGCGGTAG | 153 |
| NOV8 | GCGACTGGAGCTTTCTGGGAAGACT | 154 | CACTAGATGGCCAAGTCCTCCGGTC | 155 |
| NOV12a | ATGAAGGTAAAAGGCAGAGGAATCACC | 156 | GCCACACAGCGATAATAACCTTGGTCT | 157 |
| NOV13 | GGCCTCCGOGATTTGCTACCTTTT | 158 | AGTTACCCCACAGTCCCTGGAC | 159 |

[0656] Physical clone: Exons were predicted by homology and the intron/exon boundaries were determined using standard genetic rules. Exons were further selected and refined by means of similarity determination using multiple BLAST (for example, tBlastN, BlastX, and BlastN) searches, and, in some instances, GeneScan and Grail. Expressed sequences from both public and proprietary databases were also added when available to further define and complete the gene sequence. The DNA sequence was then manually corrected for apparent inconsistencies thereby obtaining the sequences encoding the full-length protein.

TABLE 14B
Physical Clones for PCR products

| NOVX | |
|---|---|
| Clone | Bacterial Clone |
| NOV1a | Physical clone: 147235722 |
| NOV2 | Physical clone: AC008962, S3ft: 1018515 |
| NOV3b | Physical clone: 165390393 |
| NOV3c | Physical clone: gb_AL353113 |
| NOV4b | Physical clone: gb: L24804.1 |
| NOV6b | Physical clone: 151299399, 151299404, 147249435 |
| NOV6c | Physical clone: 151299399, 151299404, 147249435 |
| NOV8 | Physical clone: 146315970, 146315964, 146315967 |
| NOV10 | Physical clone: scdb3: 5055223, AC011492 |
| NOV11a | Physical clone: 147758163 |
| NOV11b | Physical clone: 152231160 152766718 137044002 139952328 |
| NOV11c | Physical clone: gb_BE905283.1 , AC022468.5 |
| NOV13 | Bacterial clone: 87897:: AC073487.698180.M18 |

### Example 2

[0657] Quantitative Expression Analysis of Clones in Various Cells and Tissues

[0658] The quantitative expression of various clones was assessed using microtiter plates containing RNA samples from a variety of normal and pathology-derived cells, cell lines and tissues using real time quantitative PCR (RTQ PCR). RTQ PCR was performed on an Applied Biosystems ABI PRISM® 7700 or an ABI PRISM® 7900 HT Sequence Detection System. Various collections of samples are assembled on the plates, and referred to as Panel 1 (containing normal tissues and cancer cell lines), Panel 2 (containing samples derived from tissues from normal and cancer sources), Panel 3 (containing cancer cell lines), Panel 4 (containing cells and cell lines from normal tissues and cells related to inflammatory conditions), Panel 5D/5I (containing human tissues and cell lines with an emphasis on metabolic diseases), AI_comprehensive_panel (containing normal tissue and samples from autoinflammatory diseases), Panel CNSD.01 (containing samples from normal and diseased brains) and CNS_neurodegeneration_panel (containing samples from normal and Alzheimer's diseased brains).

[0659] RNA integrity from all samples is controlled for quality by visual assessment of agarose gel electropherograms using 28S and 18S ribosomal RNA staining intensity ratio as a guide (2:1 to 2.5:1 28s:18s) and the absence of low molecular weight RNAs that would be indicative of degradation products. Samples are controlled against genomic DNA contamination by RTQ PCR reactions run in the absence of reverse transcriptase using probe and primer sets designed to amplify across the span of a single exon.

[0660] First, the RNA samples were normalized to reference nucleic acids such as constitutively expressed genes (for example, β-actin and GAPDH). Normalized RNA (5 ul) was converted to cDNA and analyzed by RTQ-PCR using One Step RT-PCR Master Mix Reagents (Applied Biosystems; Catalog No. 4309169) and gene-specific primers according to the manufacturer's instructions.

[0661] In other cases, non-normalized RNA samples were converted to single strand cDNA (sscDNA) using Superscript II (Invitrogen Corporation; Catalog No. 18064-147) and random hexamers according to the manufacturer's instructions. Reactions containing up to 10 μg of total RNA were performed in a volume of 20 μl and incubated for 60 minutes at 42° C. This reaction can be scaled up to 50 μg of total RNA in a final volume of 100 μl. sscDNA samples are then normalized to reference nucleic acids as described previously, using 1×TaqMan® Universal Master mix (Applied Biosystems; catalog No. 4324020), following the manufacturer's instructions.

[0662] Probes and primers were designed for each assay according to Applied Biosystems Primer Express Software package (version I for Apple Computer's Macintosh Power PC) or a similar algorithm using the target sequence as input. Default settings were used for reaction conditions and the following parameters were set before selecting primers: primer concentration=250 nM, primer melting temperature (Tₘ) range=58°-60° C., primer optimal Tm=59° C., maximum primer difference=2° C., probe does not have 5′ G, probe Tₘ must be 10° C. greater than primer Tm, amplicon size 75 bp to 100 bp. The probes and primers selected (see below) were synthesized by Synthegen (Houston, Tex., USA). Probes were double purified by HPLC to remove uncoupled dye and evaluated by mass spectroscopy to verify coupling of reporter and quencher dyes to the 5′ and 3′ ends of the probe, respectively. Their final concentrations were: forward and reverse primers, 900 nM each, and probe, 200 nM.

[0663] PCR conditions: When working with RNA samples, normalized RNA from each tissue and each cell line was spotted in each well of either a 96 well or a 384-well PCR plate (Applied Biosystems). PCR cocktails included either a single gene specific probe and primers set, or two multiplexed probe and primers sets (a set specific for the target clone and another gene-specific set multiplexed with the target probe). PCR reactions were set up using TaqMan® One-Step RT-PCR Master Mix (Applied Biosystems, Catalog No. 4313803) following manufacturer's instructions. Reverse transcription was performed at 48° C. for 30 minutes followed by amplification/PCR cycles as follows: 95° C. 10 min, then 40 cycles of 95° C. for 15 seconds, 60° C. for 1 minute. Results were recorded as CT values (cycle at which a given sample crosses a threshold level of fluorescence) using a log scale, with the difference in RNA concentration between a given sample and the sample with the lowest CT value being represented as 2 to the power of delta CT. The percent relative expression is then obtained by taking the reciprocal of this RNA difference and multiplying by 100.

[0664] When working with sscDNA samples, normalized sscDNA was used as described previously for RNA samples. PCR reactions containing one or two sets of probe and primers were set up as described previously, using 1×TaqMan® Universal Master mix (Applied Biosystems; catalog No. 4324020), following the manufacturer's instructions. PCR amplification was performed as follows: 95° C. 10 min, then 40 cycles of 95° C. for 15 seconds, 60° C. for 1 minute. Results were analyzed and processed as described previously.

### Example 2

[0665] Quantitative Expression Analysis of Clones in Various Cells and Tissues

[0666] The quantitative expression of various clones was assessed using microtiter plates containing RNA samples from a variety of normal and pathology-derived cells, cell lines and tissues using real time quantitative PCR (RTQ PCR). RTQ PCR was performed on an Applied Biosystems ABI PRISM® 7700 or an ABI PRISMS 7900 HT Sequence Detection System. Various collections of samples are assembled on the plates, and referred to as Panel 1 (containing normal tissues and cancer cell lines), Panel 2 (containing samples derived from tissues from normal and cancer sources), Panel 3 (containing cancer cell lines), Panel 4 (containing cells and cell lines from normal tissues and cells related to inflammatory conditions), Panel 5D/5I (containing human tissues and cell lines with an emphasis on metabolic diseases), AI_comprehensive_panel (containing normal tissue and samples from autoimmune diseases), Panel CNSD.01 (containing central nervous system samples from normal and diseased brains) and CNS_neurodegeneration_panel (containing samples from normal and Alzheimer's diseased brains).

[0667] RNA integrity from all samples is controlled for quality by visual assessment of agarose gel electropherograms using 28S and 18S ribosomal RNA staining intensity ratio as a guide (2:1 to 2.5:1 28s:18s) and the absence of low molecular weight RNAs that would be indicative of degradation products. Samples are controlled against genomic DNA contamination by RTQ PCR reactions run in the absence of reverse transcriptase using probe and primer sets designed to amplify across the span of a single exon.

[0668] First, the RNA samples were normalized to reference nucleic acids such as constitutively expressed genes (for example, β-actin and GAPDH). Normalized RNA (5 ul) was converted to cDNA and analyzed by RTQ-PCR using One Step RT-PCR Master Mix Reagents (Applied Biosystems; Catalog No. 4309169) and gene-specific primers according to the manufacturer's instructions.

[0669] In other cases, non-normalized RNA samples were converted to single strand cDNA (sscDNA) using Superscript II (Invitrogen Corporation; Catalog No. 18064-147) and random hexamers according to the manufacturer's instructions. Reactions containing up to 10 μg of total RNA were performed in a volume of 20 μl and incubated for 60 minutes at 42° C. This reaction can be scaled up to 50 μg of total RNA in a final volume of 100 μl. sscDNA samples are then normalized to reference nucleic acids as described previously, using 1×TaqMan® Universal Master mix (Applied Biosystems; catalog No. 4324020), following the manufacturer's instructions.

[0670] Probes and primers were designed for each assay according to Applied Biosystems Primer Express Software package (version I for Apple Computer's Macintosh Power PC) or a similar algorithm using the target sequence as input. Default settings were used for reaction conditions and the following parameters were set before selecting primers: primer concentration=250 nM, primer melting temperature (Tm) range=58′-60° C., primer optimal Tm=59° C., maximum primer difference=2° C., probe does not have 5′G, probe Tm must be 10° C. greater than primer Tm, amplicon size 75 bp to 100 bp. The probes and primers selected (see below) were synthesized by Synthegen (Houston, Tex., USA). Probes were double purified by HPLC to remove uncoupled dye and evaluated by mass spectroscopy to verify coupling of reporter and quencher dyes to the 5′ and 3′ ends of the probe, respectively. Their final concentrations were: forward and reverse primers, 900 nM each, and probe, 200 nM.

[0671] PCR conditions: When working with RNA samples, normalized RNA from each tissue and each cell line was spotted in each well of either a 96 well or a 384-well PCR plate (Applied Biosystems). PCR cocktails included either a single gene specific probe and primers set, or two multiplexed probe and primers sets (a set specific for the target clone and another gene-specific set multiplexed with the target probe). PCR reactions were set up using TaqMan® One-Step RT-PCR Master Mix (Applied Biosystems, Catalog No. 4313803) following manufacturer's instructions. Reverse transcription was performed at 48° C.for 30 minutes followed by amplification/PCR cycles as follows: 95° C. 10 min, then 40 cycles of 95° C. for 15 seconds, 60° C. for 1 minute. Results were recorded as CT values (cycle at which a given sample crosses a threshold level of fluorescence) using a log scale, with the difference in RNA concentration between a given sample and the sample with the lowest CT value being represented as 2 to the power of delta CT. The percent relative expression is then obtained by taking the reciprocal of this RNA difference and multiplying by 100.

[0672] When working with sscDNA samples, normalized sscDNA was used as described previously for RNA samples. PCR reactions containing one or two sets of probe and primers were set up as described previously, using 1×TaqMan® Universal Master mix (Applied Biosystems; catalog No. 4324020), following the manufacturer's instructions. PCR amplification was performed as follows: 95° C. 10 min, then 40 cycles of 95° C. for 15 seconds, 60° C. for 1 minute. Results were analyzed and processed as described previously.

[0673] Panels 1, 1.1, 1.2, and 1.3D

[0674] The plates for Panels 1, 1.1, 1.2 and 1.3D include 2 control wells (genomic DNA control and chemistry control) and 94 wells containing cDNA from various samples. The samples in these panels are broken into 2 classes: samples derived from cultured cell lines and samples derived from primary normal tissues. The cell lines are derived from cancers of the following types: lung cancer, breast cancer, melanoma, colon cancer, prostate cancer, CNS cancer, squamous cell carcinoma, ovarian cancer, liver cancer, renal cancer, gastric cancer and pancreatic cancer. Cell lines used in these panels are widely available through the American Type Culture Collection (ATCC), a repository for cultured cell lines, and were cultured using the conditions recommended by the ATCC. The normal tissues found on these panels are comprised of samples derived from all major organ systems from single adult individuals or fetuses. These samples are derived from the following organs: adult skeletal muscle, fetal skeletal muscle, adult heart, fetal heart, adult kidney, fetal kidney, adult liver, fetal liver, adult lung, fetal lung, various regions of the brain, the spleen, bone marrow, lymph node, pancreas, salivary gland, pituitary gland, adrenal gland, spinal cord, thymus, stomach, small intestine, colon, bladder, trachea, breast, ovary, uterus, placenta, prostate, testis and adipose.

[0675] In the results for Panels 1, 1.1, 1.2 and 1.3D, the following abbreviations are used:

[0676] ca.=carcinoma,

[0677] =established from metastasis,

[0678] met=metastasis,

[0679] s cell var=small cell variant,

[0680] non-s=non-sm=non-small,

[0681] squam=squamous,

[0682] pl. eff=pl effusion=pleural effusion,

[0683] glio=glioma,

[0684] astro=astrocytoma, and

[0685] neuro=neuroblastoma.

[0686] General_screening_panel_{—v}1.4

[0687] The plates for Panel 1.4 include 2 control wells (genomic DNA control and chemistry control) and 94 wells containing cDNA from various samples. The samples in Panel 1.4 are broken into 2 classes: samples derived from cultured cell lines and samples derived from primary normal tissues. The cell lines are derived from cancers of the following types: lung cancer, breast cancer, melanoma, colon cancer, prostate cancer, CNS cancer, squamous cell carcinoma, ovarian cancer, liver cancer, renal cancer, gastric cancer and pancreatic cancer. Cell lines used in Panel 1.4 are widely available through the American Type Culture Collection (ATCC), a repository for cultured cell lines, and were cultured using the conditions recommended by the ATCC. The normal tissues found on Panel 1.4 are comprised of pools of samples derived from all major organ systems from 2 to 5 different adult individuals or fetuses. These samples are derived from the following organs: adult skeletal muscle, fetal skeletal muscle, adult heart, fetal heart, adult kidney, fetal kidney, adult liver, fetal liver, adult lung, fetal lung, various regions of the brain, the spleen, bone marrow, lymph node, pancreas, salivary gland, pituitary gland, adrenal gland, spinal cord, thymus, stomach, small intestine, colon, bladder, trachea, breast, ovary, uterus, placenta, prostate, testis and adipose. Abbreviations are as described for Panels 1, 1.1, 1.2, and 1.3D.

[0688] Panels 2D and 2.2

[0689] The plates for Panels 2D and 2.2 generally include 2 control wells and 94 test samples composed of RNA or cDNA isolated from human tissue procured by surgeons working in close cooperation with the National Cancer Institute's Cooperative Human Tissue Network (CHTN) or the National Disease Research Initiative (NDRI). The tissues are derived from human malignancies and in cases where indicated many malignant tissues have “matched margins” obtained from noncancerous tissue just adjacent to the tumor. These are termed normal adjacent tissues and are denoted “NAT” in the results below. The tumor tissue and the “matched margins” are evaluated by two independent pathologists (the surgical pathologists and again by a pathologist at NDRI or CHTN). This analysis provides a gross histopathological assessment of tumor differentiation grade. Moreover, most samples include the original surgical pathology report that provides information regarding the clinical stage of the patient. These matched margins are taken from the tissue surrounding (i.e. immediately proximal) to the zone of surgery (designated “NAT”, for normal adjacent tissue, in Table RR). In addition, RNA and cDNA samples were obtained from various human tissues derived from autopsies performed on elderly people or sudden death victims (accidents, etc.). These tissues were ascertained to be free of disease and were purchased from various commercial sources such as Clontech (Palo Alto, Calif.), Research Genetics, and Invitrogen.

[0690] Panel 3D

[0691] The plates of Panel 3D are comprised of 94 cDNA samples and two control samples. Specifically, 92 of these samples are derived from cultured human cancer cell lines, 2 samples of human primary cerebellar tissue and 2 controls. The human cell lines are generally obtained from ATCC (American Type Culture Collection), NCI or the German tumor cell bank and fall into the following tissue groups: Squamous cell carcinoma of the tongue, breast cancer, prostate cancer, melanoma, epidermoid carcinoma, sarcomas, bladder carcinomas, pancreatic cancers, kidney cancers, leukemias/lymphomas, ovarian/uterine/cervical, gastric, colon, lung and CNS cancer cell lines. In addition, there are two independent samples of cerebellum. These cells are all cultured under standard recommended conditions and RNA extracted using the standard procedures. The cell lines in panel 3D and 1.3D are of the most common cell lines used in the scientific literature.

[0692] Panels 4D, 4R, and 4.1D

[0693] Panel 4 includes samples on a 96 well plate (2 control wells, 94 test samples) composed of RNA (Panel 4R) or cDNA (Panels 4D/4. ID) isolated from various human cell lines or tissues related to inflammatory conditions. Total RNA from control normal tissues such as colon and lung (Stratagene, La Jolla, Calif.) and thymus and kidney (Clontech) was employed. Total RNA from liver tissue from cirrhosis patients and kidney from lupus patients was obtained from BioChain (Biochain Institute, Inc., Hayward, Calif.). Intestinal tissue for RNA preparation from patients diagnosed as having Crohn's disease and ulcerative colitis was obtained from the National Disease Research Interchange (NDRI) (Philadelphia, Pa.).

[0694] Astrocytes, lung fibroblasts, dermal fibroblasts, coronary artery smooth muscle cells, small airway epithelium, bronchial epithelium, microvascular dermal endothelial cells, microvascular lung endothelial cells, human pulmonary aortic endothelial cells, human umbilical vein endothelial cells were all purchased from Clonetics (Walkersville, Md.) and grown in the media supplied for these cell types by Clonetics. These primary cell types were activated with various cytokines or combinations of cytokines for 6 and/or 12-14 hours, as indicated. The following cytokines were used; IL-1 beta at approximately 1-5 ng/ml, TNF alpha at approximately 5-10 ng/ml, IFN gamma at approximately 20-50 ng/ml, IL-4 at approximately 5-10 ng/ml, IL-9 at approximately 5-10 ng/ml, IL-13 at approximately 5-10 ng/ml. Endothelial cells were sometimes starved for various times by culture in the basal media from Clonetics with 0.1% serum.

[0695] Mononuclear cells were prepared from blood of employees at CuraGen Corporation, using Ficoll. LAK cells were prepared from these cells by culture in DMEM 5% FCS (Hyclone), 100 μM non essential amino acids (Gibco/Life Technologies, Rockville, Md.), 1 mM sodium pyruvate (Gibco), mercaptoethanol 5.5×10⁻⁵M (Gibco), and 10 mM Hepes (Gibco) and Interleukin 2 for 4-6 days. Cells were then either activated with 10-20 ng/ml PMA and 1-2 μg/ml ionomycin, IL-12 at 5-10 ng/ml, IFN gamma at 20-50 ng/ml and IL-18 at 5-10 ng/ml for 6 hours. In some cases, mononuclear cells were cultured for 4-5 days in DMEM 5% FCS (Hyclone), 100 μM non essential amino acids (Gibco), 1 mM sodium pyruvate (Gibco), mercaptoethanol 5.5×10⁻⁵M (Gibco), and 10 mM Hepes (Gibco) with PHA (phytohemagglutinin) or PWM (pokeweed mitogen) at approximately 5 μg/ml. Samples were taken at 24, 48 and 72 hours for RNA preparation. MLR (mixed lymphocyte reaction) samples were obtained by taking blood from two donors, isolating the mononuclear cells using Ficoll and mixing the isolated mononuclear cells 1:1 at a final concentration of approximately 2×10⁶ cells/ml in DMEM 5% FCS (Hyclone), 100 μM non essential amino acids (Gibco), 1 mM sodium pyruvate (Gibco), mercaptoethanol (5.5×10⁻⁵M) (Gibco), and 10 mM Hepes (Gibco). The MLR was cultured and samples taken at various time points ranging from 1-7 days for RNA preparation.

[0696] Monocytes were isolated from mononuclear cells using CD14 Miltenyi Beads, +ve VS selection columns and a Vario Magnet according to the manufacturer's instructions. Monocytes were differentiated into dendritic cells by culture in DMEM 5% fetal calf serum (FCS) (Hyclone, Logan, Utah), 100μM non essential amino acids (Gibco), 1 mM sodium pyruvate (Gibco), mercaptoethanol 5.5×10⁻⁵M (Gibco), and 10 mM Hepes (Gibco), 50 ng/ml GMCSF and 5 ng/ml IL4 for 5-7 days. Macrophages were prepared by culture of monocytes for 5-7 days in DMEM 5% FCS (Hyclone), 100 μM non essential amino acids (Gibco), 1 mM sodium pyruvate (Gibco), mercaptoethanol 5.5×10⁻⁵M (Gibco), 10 mM Hepes (Gibco) and 10% AB Human Serum or MCSF at approximately 50 ng/ml. Monocytes, macrophages and dendritic cells were stimulated for 6 and 12-14 hours with lipopolysaccharide (LPS) at 100 ng/ml. Dendritic cells were also stimulated with anti-CD40 monoclonal antibody (Pharmingen) at 10 μg/ml for 6 and 12-14 hours.

[0697] CD4 lymphocytes, CD8 lymphocytes and NK cells were also isolated from mononuclear cells using CD4, CD8 and CD56 Miltenyi beads, positive VS selection columns and a Vario Magnet according to the manufacturer's instructions. CD45RA and CD45RO CD4 lymphocytes were isolated by depleting mononuclear cells of CD8, CD56, CD14 and CD19 cells using CD8, CD56, CD14 and CD19 Miltenyi beads and positive selection. CD45RO beads were then used to isolate the CD45RO CD4 lymphocytes with the remaining cells being CD45RA CD4 lymphocytes. CD45RA CD4, CD45RO CD4 and CD8 lymphocytes were placed in DMEM 5% FCS (Hyclone), 100 μM non essential amino acids (Gibco), 1 mM sodium pyruvate (Gibco), mercaptoethanol 5.5×10⁻⁵M (Gibco), and 10 mM Hepes (Gibco) and plated at 10⁶cells/ml onto Falcon 6 well tissue culture plates that had been coated overnight with 0.5 μg/ml anti-CD28 (Pharmingen) and 3 μg/ml anti-CD3 (OKT3, ATCC) in PBS. After 6 and 24 hours, the cells were harvested for RNA preparation. To prepare chronically activated CD8 lymphocytes, we activated the isolated CD8 lymphocytes for 4 days on anti-CD28 and anti-CD3 coated plates and then harvested the cells and expanded them in DMEM 5% FCS (Hyclone), 100 μM non essential amino acids (Gibco), 1 mM sodium pyruvate (Gibco), mercaptoethanol 5.5× ⁻⁵M (Gibco), and 10 mM Hepes (Gibco) and IL-2. The expanded CD8 cells were then activated again with plate bound anti-CI)3 and anti-CD28 for 4 days and expanded as before. RNA was isolated 6 and 24 hours after the second activation and after 4 days of the second expansion culture. The isolated NK cells were cultured in DMEM 5% FCS (Hyclone), 100 μM non essential amino acids (Gibco), 1 mM sodium pyruvate (Gibco), mercaptoethanol 5.5×10 ⁻⁵M (Gibco), and 10 mM Hepes (Gibco) and IL-2 for 4-6 days before RNA was prepared.

[0698] To obtain B cells, tonsils were procured from NDRI. The tonsil was cut up with sterile dissecting scissors and then passed through a sieve. Tonsil cells were then spun down and resupended at 10⁶cells/ml in DMEM 5% FCS (Hyclone), 100 μM non essential amino acids (Gibco), 1 mM sodium pyruvate (Gibco), mercaptoethanol 5.5×10⁻⁵M (Gibco), and 10 mM Hepes (Gibco). To activate the cells, we used PWM at 5 μg/ml or anti-CD40 (Pharmingen) at approximately 10 μg/ml and IL-4 at 5-10 ng/ml. Cells were harvested for RNA preparation at 24,48 and 72 hours.

[0699] To prepare the primary and secondary Th1/Th2 and Tr1 cells, six-well Falcon plates were coated overnight with 10 μg/ml anti-CD28 (Pharmingen) and 2 μg/ml OKT3 (ATCC), and then washed twice with PBS. Umbilical cord blood CD4 lymphocytes (Poietic Systems, German Town, Md.) were cultured at 10⁵-10⁶cells/ml in DMEM 5% FCS (Hyclone), 100 μM non essential amino acids (Gibco), 1 mM sodium pyruvate (Gibco), mercaptoethanol 5.5×10⁻⁵M (Gibco), 10 mM Hepes (Gibco) and IL-2 (4 ng/ml). IL-12 (5 ng/ml) and anti-IL4 (1 μg/ml) were used to direct to Th1, while IL4 (5 ng/ml) and anti-IFN gamma (1 μg/ml) were used to direct to Th2 and IL-10 at 5 ng/ml was used to direct to Tr1. After 4-5 days, the activated Th1, Th2 and Tr1 lymphocytes were washed once in DMEM and expanded for 4-7 days in DMEM 5% FCS (Hyclone), 100 μM non essential amino acids (Gibco), 1 mM sodium pyruvate (Gibco), mercaptoethanol 5.5×10⁻⁵M (Gibco), 10 mM Hepes (Gibco) and IL-2 (1 n/ml). Following this, the activated Th1, Th2 and Tr1 lymphocytes were re-stimulated for 5 days with anti-CD28/OKT3 and cytokines as described above, but with the addition of anti-CD95L (1 μg/ml) to prevent apoptosis. After 4-5 days, the Th1, Th2 and Tr1 lymphocytes were washed and then expanded again with IL-2 for 4-7 days. Activated Th1 and Th2 lymphocytes were maintained in this way for a maximum of three cycles. RNA was prepared from primary and secondary Th1, Th2 and Tr1 after 6 and 24 hours following the second and third activations with plate bound anti-CD3 and anti-CD28 mAbs and 4 days into the second and third expansion cultures in Interleukin 2.

[0700] The following leukocyte cells lines were obtained from the ATCC: Ramos, EOL-1, KU-812. EOL cells were further differentiated by culture in 0. I mM dbcAMP at 5×10⁵cells/ml for 8 days, changing the media every 3 days and adjusting the cell concentration to 5×10⁵cells/ml. For the culture of these cells, we used DMEM or RPMI (as recommended by the ATCC), with the addition of 5% FCS (Hyclone), 100 μM non essential amino acids (Gibco), 1 mM sodium pyruvate (Gibco), mercaptoethanol 5.5×⁻⁵M (Gibco), 10 mM Hepes (Gibco). RNA was either prepared from resting cells or cells activated with PMA at 10 ng/ml and ionomycin at 1 μg/ml for 6 and 14 hours. Keratinocyte line CCD 106 and an airway epithelial tumor line NCI-H292 were also obtained from the ATCC. Both were cultured in DMEM 5% FCS (Hyclone), 100 μM non essential amino acids (Gibco), 1 mM sodium pyruvate (Gibco), mercaptoethanol 5.5×10⁻⁵M (Gibco), and 10 mM Hepes (Gibco). CCD 1106 cells were activated for 6 and 14 hours with approximately 5 ng/ml TNF alpha and 1 ng/ml IL-1 beta, while NCI-H292 cells were activated for 6 and 14 hours with the following cytokines: 5 ng/ml IL-4, 5 ng/ml IL-9, 5 ng/ml IL-13 and 25 ng/ml IFN gamma.

[0701] For these cell lines and blood cells, RNA was prepared by lysing approximately cells/ml using Trizol (Gibco BRL). Briefly, 1/10 volume of bromochloropropane (Molecular Research Corporation) was added to the RNA sample, vortexed and after 10 minutes at room temperature, the tubes were spun at 14,000 rpm in a Sorvall SS34 rotor. The aqueous phase was removed and placed in a 15 ml Falcon Tube. An equal volume of isopropanol was added and left at -20° C. overnight. The precipitated RNA was spun down at 9,000 rpm for 15 min in a Sorvall SS34 rotor and washed in 70% ethanol. The pellet was redissolved in 300 μl of RNAse-free water and 35 μl buffer (Promega) 51l DTT, 7 μl RNAsin and 8 μL DNAse were added. The tube was incubated at 37° C. for 30 minutes to remove contaminating genomic DNA, extracted once with phenol chloroform and re-precipitated with 1/10 volume of 3M sodium acetate and 2 volumes of 100% ethanol. The RNA was spun down and placed in RNAse free water. RNA was stored at −80° C.

[0702] AI_comprehensive Panel_v1.0

[0703] The plates for Al_comprehensive panel_v1.0 include two control wells and 89 test samples comprised of cDNA isolated from surgical and postmortem human tissues obtained from the Backus Hospital and Clinomics (Frederick, Md.). Total RNA was extracted from tissue samples from the Backus Hospital in the Facility at CuraGen. Total RNA from other tissues was obtained from Clinomics.

[0704] Joint tissues including synovial fluid, synovium, bone and cartilage were obtained from patients undergoing total knee or hip replacement surgery at the Backus Hospital. Tissue samples were immediately snap frozen in liquid nitrogen to ensure that isolated RNA was of optimal quality and not degraded. Additional samples of osteoarthritis and rheumatoid arthritis joint tissues were obtained from Clinomics. Normal control tissues were supplied by Clinomics and were obtained during autopsy of trauma victims.

[0705] Surgical specimens of psoriatic tissues and adjacent matched tissues were provided as total RNA by Clinomics. Two male and two female patients were selected between the ages of and 47. None of the patients were taking prescription drugs at the time samples were isolated.

[0706] Surgical specimens of diseased colon from patients with ulcerative colitis and Crohns disease and adjacent matched tissues were obtained from Clinomics. Bowel tissue from three female and three male Crohn's patients between the ages of 41-69 were used. Two patients were not on prescription medication while the others were taking dexamethasone, phenobarbital, or tylenol. Ulcerative colitis tissue was from three male and four female patients. Four of the patients were taking lebvid and two were on phenobarbital.

[0707] Total RNA from post mortem lung tissue from trauma victims with no disease or with emphysema, asthma or COPD was purchased from Clinomics. Emphysema patients ranged in age from 40-70 and all were smokers, this age range was chosen to focus on patients with cigarette-linked emphysema and to avoid those patients with alpha-1anti-trypsin deficiencies. Asthma patients ranged in age from 36-75, and excluded smokers to prevent those patients that could also have COPD. COPD patients ranged in age from 35-80 and included both smokers and non-smokers. Most patients were taking corticosteroids, and bronchodilators.

[0708] In the labels employed to identify tissues in the Al_comprehensive panel_v1.0 panel, the following abbreviations are used:

[0709] AI=Autoimmunity

[0710] Syn=Synovial

[0711] Normal=No apparent disease

[0712] Rep22/Rep20=individual patients

[0713] RA=Rheumatoid arthritis

[0714] Backus=From Backus Hospital

[0715] OA=Osteoarthritis

[0716] (SS) (BA) (MF)=Individual patients

[0717] Adj=Adjacent tissue

[0718] Match control=adjacent tissues

[0719] -M=Male

[0720] -F=Female

[0721] COPD=Chronic obstructive pulmonary disease

[0722] Panels 5D and 5I

[0723] The plates for Panel 5D and 5I include two control wells and a variety of cDNAs isolated from human tissues and cell lines with an emphasis on metabolic diseases. Metabolic tissues were obtained from patients enrolled in the Gestational Diabetes study. Cells were obtained during different stages in the differentiation of adipocytes from human mesenchymal stem cells. Human pancreatic islets were also obtained.

[0724] In the Gestational Diabetes study subjects are young (18-40 years), otherwise healthy women with and without gestational diabetes undergoing routine (elective) Caesarean section. After delivery of the infant, when the surgical incisions were being repaired/closed, the obstetrician removed a small sample.

[0725] Patient 2: Diabetic Hispanic, overweight, not on insulin

[0726] Patient 7-9: Nondiabetic Caucasian and obese (BMI>30)

[0727] Patient 10: Diabetic Hispanic, overweight, on insulin

[0728] Patient 11: Nondiabetic African American and overweight

[0729] Patient 12: Diabetic Hispanic on insulin

[0730] Adipocyte differentiation was induced in donor progenitor cells obtained from Osirus (a division of Clonetics/BioWhittaker) in triplicate, except for Donor 3U which had only two replicates. Scientists at Clonetics isolated, grew and differentiated human mesenchymal stem cells (HuMSCs) for CuraGen based on the published protocol found in Mark F. Pittenger, et al., Multilineage Potential of Adult Human Mesenchymal Stem Cells Science Apr. 2, 1999: 143-147. Clonetics provided Trizol lysates or frozen pellets suitable for mRNA isolation and ds cDNA production. A general description of each donor is as follows:

[0731] Donor 2 and 3 U: Mesenchymal Stem cells, Undifferentiated Adipose

[0732] Donor 2 and 3 AM: Adipose, AdiposeMidway Differentiated

[0733] Donor 2 and 3 AD: Adipose, Adipose Differentiated

[0734] Human cell lines were generally obtained from ATCC (American Type Culture Collection), NCI or the German tumor cell bank and fall into the following tissue groups: kidney proximal convoluted tubule, uterine smooth muscle cells, small intestine, liver HepG2 cancer cells, heart primary stromal cells, and adrenal cortical adenoma cells. These cells are all cultured under standard recommended conditions and RNA extracted using the standard procedures. All samples were processed at CuraGen to produce single stranded cDNA.

[0735] Panel 5I contains all samples previously described with the addition of pancreatic islets from a 58 year old female patient obtained from the Diabetes Research Institute at the University of Miami School of Medicine. Islet tissue was processed to total RNA at an outside source and delivered to CuraGen for addition to panel 5I.

[0736] In the labels employed to identify tissues in the 5D and 51 panels, the following abbreviations are used:

[0737] GO Adipose=Greater Omentum Adipose

[0738] SK=Skeletal Muscle

[0739] UT=Uterus

[0740] PL=Placenta

[0741] AD=Adipose Differentiated

[0742] AM=Adipose Midway Differentiated

[0743] U=Undifferentiated Stem Cells

[0744] Panel CNSD.01

[0745] The plates for Panel CNSD.0 1 include two control wells and 94 test samples comprised of cDNA isolated from postmortem human brain tissue obtained from the Harvard Brain Tissue Resource Center. Brains are removed from calvaria of donors between 4 and 24 hours after death, sectioned by neuroanatomists, and frozen at -80° C. in liquid nitrogen vapor. All brains are sectioned and examined by neuropathologists to confirm diagnoses with clear associated neuropathology.

[0746] Disease diagnoses are taken from patient records. The panel contains two brains from each of the following diagnoses: Alzheimer's disease, Parkinson's disease, Huntington's disease, Progressive Supernuclear Palsy, Depression, and “Normal controls”. Within each of these brains, the following regions are represented: cingulate gyrus, temporal pole, globus palladus, substantia nigra, Brodman Area 4 (primary motor strip), Brodman Area 7 (parietal cortex), Brodman Area 9 (prefrontal cortex), and Brodman area 17 (occipital cortex). Not all brain regions are represented in all cases; e.g., Huntington's disease is characterized in part by neurodegeneration in the globus palladus, thus this region is impossible to obtain from confirmed Huntington's cases. Likewise Parkinson's disease is characterized by degeneration of the substantia nigra making this region more difficult to obtain. Normal control brains were examined for neuropathology and found to be free of any pathology consistent with neurodegeneration.

[0747] In the labels employed to identify tissues in the CNS panel, the following abbreviations are used:

[0748] PSP=Progressive supranuclear palsy

[0749] Sub Nigra=Substantia nigra

[0750] Glob Palladus=Globus palladus

[0751] Temp Pole=Temporal pole

[0752] Cing Gyr=Cingulate gyrus

[0753] BA 4=Brodman Area 4

[0754] Panel CNS_Neurodegeneration_V1.0

[0755] The plates for Panel CNS_Neurodegeneration_V1.0 include two control wells and 47 test samples comprised of cDNA isolated from postmortem human brain tissue obtained from the Harvard Brain Tissue Resource Center (McLean Hospital) and the Human Brain and Spinal Fluid Resource Center (VA Greater Los Angeles Healthcare System). Brains are removed from calvaria of donors between 4 and 24 hours after death, sectioned by neuroanatomists, and frozen at −80° C. in liquid nitrogen vapor. All brains are sectioned and examined by neuropathologists to confirm diagnoses with clear associated neuropathology.

[0756] Disease diagnoses are taken from patient records. The panel contains six brains from Alzheimer's disease (AD) patients, and eight brains from “Normal controls” who showed no evidence of dementia prior to death. The eight normal control brains are divided into two categories: Controls with no dementia and no Alzheimer's like pathology (Controls) and controls with no dementia but evidence of severe Alzheimer's like pathology, (specifically senile plaque load rated as level 3 on a scale of 0-3; 0=no evidence of plaques, 3=severe AD senile plaque load). Within each of these brains, the following regions are represented: hippocampus, temporal cortex (Brodman Area 21), parietal cortex (Brodman area 7), and occipital cortex (Brodman area 17). These regions were chosen to encompass all levels of neurodegeneration in AD. The hippocampus is a region of early and severe neuronal loss in AD; the temporal cortex is known to show neurodegeneration in AD after the hippocampus;

[0757] the parietal cortex shows moderate neuronal death in the late stages of the disease; the occipital cortex is spared in AD and therefore acts as a “control” region within AD patients. Not all brain regions are represented in all cases.

[0758] In the labels employed to identify tissues in the CNS_Neurodegeneration_V1.0 panel, the following abbreviations are used:

[0759] AD=Alzheimer's disease brain; patient was demented and showed AD-like pathology upon autopsy

[0760] Control=Control brains; patient not demented, showing no neuropathology

[0761] Control (Path)=Control brains; pateint not demented but showing sever AD-like pathology

[0762] SupTemporal Ctx=Superior Temporal Cortex

[0763] Inf Temporal Ctx Inferior Temporal Cortex

[0764] NOV9

[0765] Expression of gene NOV9 was assessed using the primer-probe sets Ag2708, Ag299 and Ag 1347, described in Tables 15, 16 and 17. Results of the RTQ-PCR runs are shown in Tables 18, 19, 20, 21, 22, and 23.

TABLE 15
Probe Name Ag2708

| Primers | Sequences | Length | Start Position | SEQ ID NO: |
|---|---|---|---|---|
| Forward | 5′-ggtgctcatcttgcttttaaca-3′ | 22 | 491 | 160 |
| Probe | TET-5′-tctttgtgaggttcctccattgctca-3′-TAMRA | 26 | 542 | 161 |
| Reverse | 5′-gtagtgtcaacacaggcaagct-3′ | 22 | 568 | 162 |

[0766] TABLE 16
Probe Name Ag299

| | | | | SEQ ID |
|---|---|---|---|---|
| Primers | Sequences | Length | Start Position | NO: |
| Forward | 5′-gtgatggcatttgaccgctat-3′ | 21 | 360 | 163 |
| Probe | TET-5′-agctgtttgcaggcccctccactac-3′-TAMRA | 25 | 383 | 164 |
| Reverse | 5′-catacagacaagggtgcatgactac-3′ | 25 | 411 | 165 |

[0767] TABLE 17
Probe Name Ag1347

| | | | | SEQ ID |
|---|---|---|---|---|
| Primers | Sequences | Length | Start Position | NO: |
| Forward | 5′-acaccatcattacacccatgat-3′ | 22 | 844 | 166 |
| Probe | TET-5′-cccctcatatatacactgaggaacaagga-3′-TAMRA | 29 | 870 | 167 |
| Reverse | 5′-gcaccttcttaagtgctccttt-3′ | 22 | 903 | 168 |

[0768] TABLE 18
CNS_neurodegeneration_v1.0

| | Rel. Exp. (%) | Rel. Exp. (%) | | Rel. Exp. (%) | Rel. Exp. (%) |
|---|---|---|---|---|---|
| | Ag2708, Run | Ag299, Run | Tissue | Ag2708, Run | Ag299, Run |
| Tissue Name | 208394380 | 206914240 | Name | 208394380 | 206914240 |
| AD 1 Hippo | 0.0 | 8.4 | Control | 7.4 | 0.0 |
| | | | (Path) 3 | | |
| | | | Temporal | | |
| | | | Ctx | | |
| AD 2 Hippo | 0.0 | 54.3 | Control | 19.5 | 15.0 |
| | | | (Path) 4 | | |
| | | | Temporal | | |
| | | | Ctx | | |
| AD 3 Hippo | 0.0 | 0.0 | AD 1 | 9.0 | 15.5 |
| | | | Occipital | | |
| | | | Ctx | | |
| AD 4 Hippo | 0.0 | 9.3 | AD 2 | 0.0 | 0.0 |
| | | | Occipital | | |
| | | | Ctx | | |
| | | | (Missing) | | |
| AD 5 hippo | 15.3 | 37.1 | AD 3 | 20.7 | 10.3 |
| | | | Occipital | | |
| | | | Ctx | | |
| AD 6 Hippo | 15.4 | 50.3 | AD 4 | 21.2 | 9.7 |
| | | | Occipital | | |
| | | | Ctx | | |
| Control 2 | 25.9 | 15.0 | AD 5 | 0.0 | 5.8 |
| Hippo | | | Occipital | | |
| | | | Ctx | | |
| Control 4 | 75.8 | 80.1 | AD 6 | 21.9 | 5.6 |
| Hippo | | | Occipital | | |
| | | | Ctx | | |
| Control (Path) 3 | 0.0 | 0.0 | Control 1 | 0.0 | 0.0 |
| Hippo | | | Occipital | | |
| | | | Ctx | | |
| AD 1 Temporal | 38.2 | 37.4 | Control 2 | 41.5 | 15.7 |
| Ctx | | | Occipital | | |
| | | | Ctx | | |
| AD 2 Temporal | 46.0 | 32.8 | Control 3 | 7.8 | 8.1 |
| Ctx | | | Occipital | | |
| | | | Ctx | | |
| AD 3 Temporal | 0.0 | 0.0 | Control 4 | 32.1 | 21.3 |
| Ctx | | | Occipital | | |
| | | | Ctx | | |
| AD 4 Temporal | 0.0 | 6.7 | Control | 29.9 | 39.0 |
| Ctx | | | (Path) 1 | | |
| | | | Occipital | | |
| | | | Ctx | | |
| AD 5 Inf | 23.2 | 0.0 | Control | 41.2 | 45.4 |
| Temporal Ctx | | | (Path) 2 | | |
| | | | Occipital | | |
| | | | Ctx | | |
| AD 5 | 23.2 | 15.8 | Control | 0.0 | 0.0 |
| SupTemporal | | | (Path) 3 | | |
| Ctx | | | Occipital | | |
| | | | Ctx | | |
| AD 6 Inf | 39.0 | 14.3 | Control | 11.8 | 9.2 |
| Temporal Ctx | | | (Path) 4 | | |
| | | | Occipital | | |
| | | | Ctx | | |
| AD 6 Sup | 100.0 | 46.0 | Control 1 | 9.4 | 18.0 |
| Temporal Ctx | | | Parietal Ctx | | |
| Control 1 | 0.0 | 0.0 | Control 2 | 23.8 | 31.0 |
| Temporal Ctx | | | Parietal Ctx | | |
| Control 2 | 13.2 | 0.0 | Control 3 | 9.3 | 66.4 |
| Temporal Ctx | | | Parietal Ctx | | |
| Control 3 | 0.0 | 0.0 | Control | 38.4 | 45.1 |
| Temporal Ctx | | | (Path) 1 | | |
| | | | Parietal Ctx | | |
| Control 4 | 37.6 | 34.6 | Control | 9.2 | 20.0 |
| Temporal Ctx | | | (Path) 2 | | |
| | | | Parietal Ctx | | |
| Control (Path) 1 | 31.0 | 43.8 | Control | 0.0 | 0.0 |
| Temporal Ctx | | | (Path) 3 | | |
| | | | Parietal Ctx | | |
| Control (Path) 2 | 41.8 | 100.0 | Control | 73.7 | 33.4 |
| Temporal Ctx | | | (Path) 4 | | |
| | | | Parietal Ctx | | |

[0769] TABLE 19
Panel 1

| | Rel. Exp. (%) Ag299, | | Rel. Exp. (%) Ag299, |
|---|---|---|---|
| Tissue Name | Run 117874412 | Tissue Name | Run 117874412 |
| Endothelial cells | 0.0 | Renal ca. 786-0. | 1.3 |
| Endothelial cells | 0.0 | Renal ca. A498 | 1.5 |
| (treated) | | | |
| Pancreas | 3.6 | Renal ca. RXF 393 | 0.4 |
| Pancreatic ca. CAPAN 2 | 0.9 | Renal ca. ACHN | 0.0 |
| Adrenal gland | 4.5 | Renal ca. UO-31 | 1.6 |
| Thyroid | 2.9 | Renal ca. TK-10 | 2.7 |
| Salivary gland | 3.5 | Liver | 1.7 |
| Pituitary gland | 0.0 | Liver (fetal) | 0.0 |
| Brain (fetal) | 2.0 | Liver ca. | 9.0 |
| | | (hepatoblast) HepG2 | |
| Brain (whole) | 1.6 | Lung | 0.1 |
| Brain (amygdala) | 3.6 | Lung (fetal) | 0.7 |
| Brain (cerebellum) | 4.3 | Lung ca. (small cell) | 1.4 |
| | | LX-1 | |
| Brain (hippocampus) | 4.5 | Lung ca. (small cell) | 12.9 |
| | | NCI-H69 | |
| Brain (substantia nigra) | 4.4 | Lung ca. (s.cell var.) | 0.8 |
| | | SHP-77 | |
| Brain (thalamus) | 4.2 | Lung ca. (large | 5.2 |
| | | cell)NCI-H460 | |
| Brain (hypothalamus) | 4.5 | Lung ca. (non-sm. | 2.1 |
| | | cell) A549 | |
| Spinal cord | 0.9 | Lung ca. (non-s.cell) | 2.3 |
| | | NCI-H23 | |
| glio/astro U87-MG | 0.0 | Lung ca. (non-s.cell) | 8.4 |
| | | HOP-62 | |
| glio/astro U-118-MG | 0.6 | Lung ca. (non-s.cl) | 27.4 |
| | | NCI-H522 | |
| astrocytoma SW1783 | 0.5 | Lung ca. (squam.) | 5.5 |
| | | SW 900 | |
| neuro*; met SK-N-AS | 0.0 | Lung ca. (squam.) | 3.8 |
| | | NCI-H596 | |
| astrocytoma SF-539 | 1.0 | Mammary gland | 7.0 |
| astrocytoma SNB-75 | 0.0 | Breast ca.* (pl.ef) | 1.8 |
| | | MCF-7 | |
| glioma SNB-19 | 5.8 | Breast ca.* (pl.ef) | 1.6 |
| | | MDA-MB-231 | |
| glioma U251 | 1.6 | Breast ca.* (pl. ef) | 12.3 |
| | | T47D | |
| glioma SF-295 | 0.3 | Breast ca. BT-549 | 2.1 |
| Heart | 0.9 | Breast ca. MDA-N | 1.7 |
| Skeletal muscle | 0.1 | Ovary | 0.9 |
| Bone marrow | 1.0 | Ovarian ca. OVCAR-3 | 6.5 |
| Thymus | 2.8 | Ovarian ca. OVCAR-4 | 0.2 |
| Spleen | 3.0 | Ovarian ca. OVCAR-5 | 19.8 |
| Lymph node | 0.4 | Ovarian ca. OVCAR-8 | 40.9 |
| Colon (ascending) | 23.8 | Ovarian ca. IGROV-1 | 2.7 |
| Stomach | 0.7 | Ovarian ca. (ascites) | 3.1 |
| | | SK-OV-3 | |
| Small intestine | 0.7 | Uterus | 9.7 |
| Colon ca. SW480 | 0.0 | Placenta | 1.0 |
| Colon ca.* SW620 | 0.7 | Prostate | 4.2 |
| (SW480 met) | | | |
| Colon ca. HT29 | 3.1 | Prostate ca.* (bone | 3.3 |
| | | met) PC-3 | |
| Colon ca. HCT-116 | 4.8 | Testis | 8.7 |
| Colon ca. CaCo-2 | 3.1 | Melanoma | 0.0 |
| | | Hs688(A).T | |
| Colon ca. HCT-15 | 5.3 | Melanoma* (met) | 0.4 |
| | | Hs688(B).T | |
| Colon ca. HCC-2998 | 10.7 | Melanoma UACC-62 | 0.0 |
| Gastric ca.* (liver | 6.9 | Melanoma M14 | 2.7 |
| met) NCI-N87 | | | |
| Bladder | 4.3 | Melanoma LOX | 0.1 |
| | | IMVI | |
| Trachea | 0.7 | Melanoma* (met) | 0.1 |
| | | SK-MEL-5 | |
| Kidney | 8.2 | Melanoma SK-MEL- | 100.0 |
| | | 28 | |
| Kidney (fetal) | 7.7 | | |

[0770] TABLE 20
Panel 1.2

| | Rel. Exp. (%) | Rel. Exp. (%) | | Rel. Exp. (%) | Rel. Exp. (%) |
|---|---|---|---|---|---|
| | Ag1347, Run | Ag1347, Run | | Ag1347, Run | Ag1347, Run |
| Tissue Name | 132938391 | 133337395 | Tissue Name | 132938391 | 133337395 |
| Endothelial cells | 2.8 | 0.0 | Renal ca. 786-0 | 2.0 | 1.2 |
| Heart (Fetal) | 1.0 | 2.0 | Renal ca. A498 | 4.9 | 12.9 |
| Pancreas | 4.2 | 8.3 | Renal ca. | 0.8 | 0.0 |
| | | | RXF 393 | | |
| Pancreatic ca. | 0.7 | 1.5 | Renal ca. | 0.7 | 0.8 |
| CAPAN 2 | | | ACHN | | |
| Adrenal Gland | 16.0 | 20.0 | Renal ca. | 3.8 | 0.0 |
| | | | UO-31 | | |
| Thyroid | 11.3 | 16.6 | Renal ca. | 10.3 | 6.6 |
| | | | TK-10 | | |
| Salivary gland | 20.4 | 26.4 | Liver | 3.4 | 12.9 |
| Pituitary gland | 13.3 | 11.7 | Liver (fetal) | 3.4 | 6.7 |
| Brain (fetal) | 10.2 | 6.7 | Liver ca. | 33.4 | 12.2 |
| | | | (hepatoblast) | | |
| | | | HepG2 | | |
| Brain (whole) | 7.6 | 12.9 | Lung | 2.1 | 3.6 |
| Brain | 5.8 | 11.6 | Lung (fetal) | 4.0 | 3.2 |
| (amygdala) | | | | | |
| Brain | 6.6 | 15.3 | Lung ca. | 2.7 | 0.0 |
| (cerebellum) | | | (small cell) | | |
| | | | LX-1 | | |
| Brain | 19.6 | 24.0 | Lung ca. | 27.5 | 25.5 |
| (hippocampus) | | | (small cell) | | |
| | | | NCI-H69 | | |
| Brain (thalamus) | 10.8 | 12.9 | Lung ca. (s.cell | 2.2 | 2.3 |
| | | | var.) SHP-77 | | |
| Cerebral Cortex | 22.1 | 27.7 | Lung ca. (large | 17.6 | 25.0 |
| | | | cell)NCI-H460 | | |
| Spinal cord | 3.0 | 6.7 | Lung ca. (non- | 4.2 | 3.6 |
| | | | sm. cell) A549 | | |
| glio/astro | 1.5 | 0.0 | Lung ca. | 5.1 | 7.0 |
| U87-MG | | | (non-s.cell) | | |
| | | | NCI-H23 | | |
| glio/astro | 2.6 | 4.1 | Lung ca. | 16.7 | 29.5 |
| U-118-MG | | | (non-s.cell) | | |
| | | | HOP-62 | | |
| astrocytoma | 1.3 | 2.4 | Lung ca. | 84.1 | 100.0 |
| SW1783 | | | (non-s.cl) | | |
| | | | NCI-H522 | | |
| neuro*; met | 2.5 | 0.0 | Lung ca. | 1.2 | 6.1 |
| SK-N-AS | | | (squam.) SW | | |
| | | | 900 | | |
| astrocytoma | 4.6 | 2.9 | Lung ca. | 4.8 | 3.3 |
| SF-539 | | | (squam.) NCI | | |
| | | | H596 | | |
| astrocytoma | 0.0 | 0.0 | Mammary | 5.4 | 12.8 |
| SNB-75 | | | gland | | |
| glioma SNB-19 | 9.0 | 8.1 | Breast ca.* | 6.6 | 6.8 |
| | | | (pl.ef) MCF-7 | | |
| glioma U251 | 1.6 | 3.6 | Breast ca.* | 2.9 | 3.0 |
| | | | (pl.ef) | | |
| | | | MDA-MB-231 | | |
| glioma SF-295 | 0.0 | 1.0 | Breast ca.* (pl. | 29.5 | 51.4 |
| | | | ef) T47D | | |
| Heart | 3.4 | 6.0 | Breast ca. | 5.6 | 11.5 |
| | | | BT-549 | | |
| Skeletal Muscle | 4.4 | 0.3 | Breast ca. | 6.4 | 2.1 |
| | | | MDA-N | | |
| Bone marrow | 4.1 | 3.5 | Ovary | 2.9 | 3.4 |
| Thymus | 2.8 | 4.1 | Ovarian ca. | 5.4 | 15.1 |
| | | | OVCAR-3 | | |
| Spleen | 1.8 | 3.5 | Ovarian ca. | 0.5 | 0.8 |
| | | | OVCAR-4 | | |
| Lymph node | 5.6 | 1.6 | Ovarian ca. | 25.9 | 13.5 |
| | | | OVCAR-5 | | |
| Colorectal | 11.0 | 8.6 | Ovarian ca. | 100.0 | 53.2 |
| Tissue | | | OVCAR-8 | | |
| Stomach | 4.7 | 7.2 | Ovarian ca. | 10.7 | 1.0 |
| | | | IGROV-1 | | |
| Small intestine | 0.6 | 2.2 | Ovarian ca. | 5.3 | 4.9 |
| | | | (ascites) | | |
| | | | SK-OV-3 | | |
| Colon ca. | 0.0 | 0.0 | Uterus | 7.5 | 6.7 |
| SW480 | | | | | |
| Colon ca.* | 0.8 | 1.5 | Placenta | 31.0 | 24.1 |
| SW620 | | | | | |
| (SW480met) | | | | | |
| Colon ca. HT29 | 7.4 | 3.0 | Prostate | 18.6 | 20.9 |
| Colon ca. | 0.7 | 9.6 | Prostate ca.* | 7.9 | 5.1 |
| HCT-116 | | | (bone met) | | |
| | | | PC-3 | | |
| Colon ca. CaCo-2 | 3.8 | 9.2 | Testis | 34.4 | 11.8 |
| Colon ca. Tissue | 20.6 | 27.5 | Melanoma | 0.0 | 1.4 |
| (ODO3866) | | | Hs688(A).T | | |
| Colon ca. HCC- | 38.4 | 19.5 | Melanoma* | 5.1 | 0.0 |
| 2998 | | | (met) | | |
| | | | Hs688(B).T | | |
| Gastric ca.* | 6.2 | 1.1 | Melanoma | 0.0 | 0.0 |
| (liver met) | | | UACC-62 | | |
| NCI-N87 | | | | | |
| Bladder | 5.3 | 6.8 | Melanoma | 8.5 | 16.0 |
| | | | M14 | | |
| Trachea | 4.4 | 15.1 | Melanoma | 0.0 | 1.4 |
| | | | LOXIMVI | | |
| Kidney | 12.3 | 12.5 | Melanoma* | 3.5 | 1.7 |
| | | | (met) | | |
| | | | SK-MEL-5 | | |
| Kidney (fetal) | 15.1 | 34.2 | | | |

[0771] TABLE 21
Panel 1.3D

| | Rel. Exp. (%) | Rel. Exp. (%) | Rel. Exp. (%) | | Rel. Exp. (%) | Rel. Exp. (%) | Rel. Exp. (%) |
|---|---|---|---|---|---|---|---|
| | Ag299, Run | Ag299, Run | Ag299, Run | | Ag299, Run | Ag299, Run | Ag299, Run |
| Tissue Name | 150863120 | 150981000 | 151719344 | Tissue Name | 150863120 | 150981000 | 151719344 |
| Liver | 9.3 | 0.0 | 0.0 | Kidney | 0.0 | 4.0 | 9.7 |
| adenocarcin | | | | (fetal) | | | |
| oma | | | | | | | |
| Pancreas | 0.0 | 10.2 | 18.9 | Renal ca. | 28.3 | 0.0 | 0.0 |
| | | | | 786-0 | | | |
| Pancreatic | 0.0 | 8.8 | 0.0 | Renal ca. | 9.2 | 31.4 | 9.9 |
| ca. CAPAN 2 | | | | A498 | | | |
| Adrenal | 0.0 | 0.0 | 14.6 | Renal ca. | 0.0 | 0.0 | 0.0 |
| gland | | | | RXF 393 | | | |
| Thyroid | 25.5 | 0.0 | 12.2 | Renal ca. | 0.0 | 0.0 | 24.3 |
| | | | | ACHN | | | |
| Salivary | 12.9 | 14.4 | 3.9 | Renal ca. | 0.0 | 0.0 | 0.0 |
| gland | | | | UO-31 | | | |
| Pituitary | 18.4 | 18.7 | 17.0 | Renal ca. | 0.0 | 6.3 | 13.1 |
| gland | | | | TK-10 | | | |
| Brain (fetal) | 11.6 | 0.0 | 0.0 | Liver | 0.0 | 14.0 | 14.8 |
| Brain | 0.0 | 6.5 | 0.0 | Liver (fetal) | 3.8 | 0.0 | 0.0 |
| (whole) | | | | | | | |
| Brain | 13.8 | 10.9 | 66.0 | Liver ca. | 2.9 | 10.5 | 11.7 |
| (amygdala) | | | | (hepatoblast) | | | |
| | | | | HepG2 | | | |
| Brain | 31.0 | 8.6 | 3.5 | Lung | 0.0 | 10.6 | 0.0 |
| (cerebellum) | | | | | | | |
| Brain | 20.0 | 48.6 | 22.7 | Lung (fetal) | 0.0 | 9.9 | 18.4 |
| (hippocampus) | | | | | | | |
| Brain | 5.2 | 7.7 | 0.0 | Lung ca. | 10.7 | 3.2 | 0.0 |
| (substantia | | | | (small cell) | | | |
| nigra) | | | | LX-1 | | | |
| Brain | 14.4 | 5.0 | 8.8 | Lung ca. | 14.3 | 0.0 | 19.1 |
| (thalamus) | | | | (small cell) | | | |
| | | | | NCI-H69 | | | |
| Cerebral | 27.9 | 12.6 | 36.6 | Lung ca. | 0.0 | 0.0 | 0.0 |
| Cortex | | | | (s.cell var.) | | | |
| | | | | SHP-77 | | | |
| Spinal cord | 19.8 | 0.0 | 35.1 | Lung ca. | 0.0 | 0.0 | 0.0 |
| | | | | (large | | | |
| | | | | cell) | | | |
| | | | | NCI-H460 | | | |
| glio/astro | 0.0 | 0.0 | 0.0 | Lung ca. | 0.0 | 0.0 | 0.0 |
| U87-MG | | | | (non-sm. | | | |
| | | | | cell) A549 | | | |
| glio/astro | 0.0 | 0.0 | 22.8 | Lung ca. | 10.8 | 15.0 | 0.0 |
| U-118-MG | | | | (non-s.cell) | | | |
| | | | | NCI-H23 | | | |
| astrocytoma | 10.7 | 8.0 | 0.0 | Lung ca. | 20.9 | 24.7 | 43.2 |
| SW1783 | | | | (non-s.cell) | | | |
| | | | | HOP-62 | | | |
| neuro*; met | 0.0 | 8.8 | 0.0 | Lung ca. | 47.3 | 57.0 | 72.7 |
| SK-N-AS | | | | (non-s.cl) | | | |
| | | | | NCI-H522 | | | |
| astrocytoma | 19.2 | 7.1 | 20.2 | Lung ca. | 11.1 | 23.3 | 0.0 |
| SF-539 | | | | (squam.) | | | |
| | | | | SW900 | | | |
| astrocytoma | 0.0 | 0.0 | 17.9 | Lung ca. | 0.0 | 0.0 | 0.0 |
| SNB-75 | | | | (squam.) | | | |
| | | | | NCI-H596 | | | |
| glioma | 0.0 | 0.0 | 14.0 | Mammary | 0.0 | 11.3 | 0.0 |
| SNB-19 | | | | gland | | | |
| glioma | 35.8 | 0.0 | 0.0 | Breast ca.* | 25.5 | 9.7 | 9.0 |
| U251 | | | | (pl.ef) | | | |
| | | | | MCF-7 | | | |
| glioma | 0.0 | 0.0 | 12.5 | Breast ca.* | 32.8 | 4.4 | 14.6 |
| SF-295 | | | | (pl.ef) | | | |
| | | | | MDA-MB- | | | |
| | | | | 231 | | | |
| Heart (fetal) | 0.0 | 0.0 | 0.0 | Breast ca.* | 29.7 | 16.6 | 27.9 |
| | | | | (pl.ef) | | | |
| | | | | T47D | | | |
| Heart | 10.8 | 0.0 | 0.0 | Breast ca. | 0.0 | 0.0 | 0.0 |
| | | | | BT-549 | | | |
| Skeletal | 67.4 | 27.5 | 100.0 | Breast ca. | 0.0 | 0.0 | 10.7 |
| muscle | | | | MDA-N | | | |
| (fetal) | | | | | | | |
| Skeletal | 0.0 | 0.0 | 1.7 | Ovary | 0.0 | 0.0 | 0.0 |
| muscle | | | | | | | |
| Bone | 0.0 | 0.0 | 14.7 | Ovarian ca. | 28.7 | 8.5 | 62.0 |
| marrow | | | | OVCAR-3 | | | |
| Thymus | 0.0 | 0.0 | 11.4 | Ovarian ca. | 0.0 | 0.0 | 0.0 |
| | | | | OVCAR-4 | | | |
| Spleen | 19.1 | 14.4 | 0.0 | Ovarian ca. | 7.0 | 9.5 | 23.7 |
| | | | | OVCAR-5 | | | |
| Lymph node | 7.0 | 10.6 | 0.0 | Ovarian ca. | 100.0 | 89.5 | 45.7 |
| | | | | OVCAR-8 | | | |
| Colorectal | 0.0 | 30.4 | 19.3 | Ovarian ca. | 0.0 | 10.9 | 14.5 |
| | | | | IGROV-1 | | | |
| Stomach | 17.0 | 10.4 | 12.2 | Ovarian | 9.4 | 15.2 | 22.8 |
| | | | | ca.* | | | |
| | | | | (ascites) | | | |
| | | | | SK-OV-3 | | | |
| Small | 0.0 | 0.0 | 0.0 | Uterus | 4.0 | 6.8 | 0.0 |
| intestine | | | | | | | |
| Colon ca. | 0.0 | 0.0 | 25.0 | Plancenta | 0.0 | 0.0 | 12.2 |
| SW480 | | | | | | | |
| Colon ca.* | 10.2 | 0.0 | 0.0 | Prostate | 10.2 | 7.0 | 11.3 |
| SW620(SW | | | | | | | |
| 480 met) | | | | | | | |
| Colon ca. | 14.7 | 0.0 | 11.5 | Prostate | 0.0 | 0.0 | 0.0 |
| HT29 | | | | ca.* (bone | | | |
| | | | | met)PC-3 | | | |
| Colon ca. | 9.7 | 29.1 | 42.9 | Testis | 44.8 | 100.0 | 66.9 |
| HCT-116 | | | | | | | |
| Colon ca. | 7.4 | 4.2 | 6.8 | Melanoma | 0.0 | 0.0 | 0.0 |
| CaCo-2 | | | | Hs688(A).T | | | |
| Colon ca. | 0.0 | 0.0 | 0.0 | Melanoma* | 0.0 | 0.0 | 0.0 |
| tissue(ODO | | | | (met) | | | |
| 3866) | | | | Hs688(B).T | | | |
| Colon ca. | 14.3 | 23.8 | 32.5 | Melanoma | 0.0 | 0.0 | 0.0 |
| HCC-2998 | | | | UACC-62 | | | |
| Gastric ca.* | 10.2 | 62.4 | 11.4 | Melanoma | 0.0 | 0.0 | 0.0 |
| (liver met) | | | | M14 | | | |
| NCI-N87 | | | | | | | |
| Bladder | 0.0 | 4.3 | 5.8 | Melanoma | 0.0 | 0.0 | 0.0 |
| | | | | LOX IMVI | | | |
| Trachea | 4.6 | 20.4 | 0.0 | Melanoma* | 0.0 | 0.0 | 0.0 |
| | | | | (met) | | | |
| | | | | SK-MEL-5 | | | |
| Kidney | 0.0 | 0.0 | 0.0 | Adipose | 0.0 | 0.0 | 4.3 |

[0772] TABLE 22
Panel 2D

| | Rel. Exp. (%) | Rel. Exp. (%) | | Rel. Exp. (%) | Rel. Exp. (%) |
|---|---|---|---|---|---|
| | Ag2708, Run | Ag299, Run | | Ag2708, Run | Ag299, Run |
| Tissue Name | 153218692 | 150811734 | Tissue Name | 153218692 | 150811734 |
| Normal Colon | 3.0 | 25.2 | Kidney | 1.0 | 0.0 |
| | | | Margin | | |
| | | | 8120608 | | |
| CC Well to Mod | 1.9 | 1.3 | Kidney Cancer | 0.0 | 3.8 |
| Diff (ODO3866) | | | 8120613 | | |
| CC Margin | 0.0 | 3.5 | Kidney | 0.0 | 8.6 |
| (ODO3866) | | | Margin | | |
| | | | 8120614 | | |
| CC Gr.2 | 0.0 | 2.7 | Kidney Cancer | 0.0 | 0.0 |
| rectosigmoid | | | 9010320 | | |
| (ODO3868) | | | | | |
| CC Margin | 1.1 | 0.0 | Kidney | 1.3 | 3.8 |
| (ODO3868) | | | Margin | | |
| | | | 9010321 | | |
| CC Mod Diff | 0.0 | 0.0 | Normal Uterus | 0.0 | 0.0 |
| (ODO3920) | | | | | |
| CC Margin | 0.0 | 6.0 | Uterus Cancer | 10.4 | 22.2 |
| (ODO3920) | | | 064011 | | |
| CC Gr.2 ascend | 0.0 | 2.6 | Normal | 8.5 | 9.6 |
| colon | | | Thyroid | | |
| (ODO3921) | | | | | |
| CC Margin | 0.7 | 1.9 | Thyroid | 0.0 | 0.0 |
| (ODO3921) | | | Cancer 064010 | | |
| CC from Partial | 0.0 | 6.7 | Thyroid | 4.7 | 14.9 |
| Hepatectomy | | | Cancer | | |
| (ODO4309) | | | A302152 | | |
| Mets | | | | | |
| Liver Margin | 1.2 | 1.0 | Thyroid | 3.6 | 14.2 |
| (ODO4309) | | | Margin | | |
| | | | A302153 | | |
| Colon mets to | 1.1 | 3.7 | Normal Breast | 5.4 | 12.4 |
| lung | | | | | |
| (OD04451-01) | | | | | |
| Lung Margin | 1.7 | 2.6 | Breast Cancer | 2.4 | 4.1 |
| (OD04451-02) | | | (OD04566) | | |
| Normal Prostate | 6.1 | 5.3 | Breast Cancer | 3.0 | 20.3 |
| 6546-1 | | | (OD04590-01) | | |
| Prostate Cancer | 1.6 | 2.5 | Breast Cancer | 1.7 | 12.9 |
| (OD04410) | | | Mets | | |
| | | | (OD04590-03) | | |
| Prostate Margin | 0.6 | 11.3 | Breast Cancer | 0.5 | 7.7 |
| (OD04410) | | | Metastasis | | |
| | | | (OD04655-05) | | |
| Prostate Cancer | 20.3 | 100.0 | Breast Cancer | 0.0 | 2.6 |
| (OD04720-01) | | | 064006 | | |
| Prostate Margin | 9.2 | 60.3 | Breast Cancer | 100.0 | 62.0 |
| (OD04720-02) | | | 1024 | | |
| Normal Lung | 19.5 | 24.3 | Breast Cancer | 2.1 | 2.0 |
| 061010 | | | 9100266 | | |
| Lung Met to | 0.0 | 11.7 | Breast Margin | 1.5 | 4.1 |
| Muscle | | | 9100265 | | |
| (ODO4286) | | | | | |
| Muscle Margin | 5.1 | 10.9 | Breast Cancer | 8.0 | 18.4 |
| (ODO4286) | | | A209073 | | |
| Lung Malignant | 0.0 | 8.3 | Breast Margin | 9.3 | 47.3 |
| Cancer | | | A2090734 | | |
| (OD03126) | | | | | |
| Lung Margin | 1.8 | 4.2 | Normal Liver | 4.4 | 4.1 |
| (OD03126) | | | | | |
| Lung Cancer | 1.1 | 5.8 | Liver Cancer | 1.2 | 12.1 |
| (OD04404) | | | 064003 | | |
| Lung Margin | 0.0 | 17.1 | Liver Cancer | 0.0 | 0.0 |
| (OD04404) | | | 1025 | | |
| Lung Cancer | 0.0 | 4.1 | Liver Cancer | 1.2 | 0.0 |
| (OD04565) | | | 1026 | | |
| Lung Margin | 1.2 | 3.7 | Liver Cancer | 2.3 | 0.0 |
| (OD04565) | | | 6004-T | | |
| Lung Cancer | 0.0 | 0.0 | Liver Tissue | 2.3 | 15.7 |
| (OD04237-01) | | | 6004-N | | |
| Lung Margin | 0.5 | 0.0 | Liver Cancer | 0.0 | 0.0 |
| (OD04237-02) | | | 6005-T | | |
| Ocular Mel Met | 1.5 | 0.0 | Liver Tissue | 0.0 | 0.0 |
| to Liver | | | 6005-N | | |
| (ODO4310) | | | | | |
| Liver Margin | 0.4 | 0.0 | Normal | 0.6 | 0.0 |
| (ODO4310) | | | Bladder | | |
| Melanoma Mets | 1.0 | 0.0 | Bladder | 2.5 | 0.0 |
| to Lung | | | Cancer 1023 | | |
| (OD04321) | | | | | |
| Lung Margin | 0.0 | 0.0 | Bladder | 1.0 | 12.3 |
| (OD04321) | | | Cancer | | |
| | | | A302173 | | |
| Normal Kidney | 33.0 | 94.6 | Bladder | 0.0 | 12.1 |
| | | | Cancer | | |
| | | | (OD04718-01) | | |
| Kidney Ca, | 8.0 | 47.0 | Bladder | 0.0 | 8.1 |
| Nuclear grade 2 | | | Normal | | |
| (OD04338) | | | Adjacent | | |
| | | | (OD04718-03) | | |
| Kidney Margin | 2.1 | 10.4 | Normal Ovary | 0.0 | 0.0 |
| (OD04338) | | | | | |
| Kidney Ca | 2.2 | 8.0 | Ovarian | 0.0 | 4.5 |
| Nuclear grade | | | Cancer 064008 | | |
| 1/2 (OD04339) | | | | | |
| Kidney Margin | 7.8 | 42.0 | Ovarian | 2.4 | 3.5 |
| (OD04339) | | | Cancer | | |
| | | | (OD04768-07) | | |
| Kidney Ca, Clear | 0.0 | 0.0 | Ovary Margin | 0.0 | 0.0 |
| cell type | | | (OD04768-08) | | |
| (OD04340) | | | | | |
| Kidney Margin | 8.6 | 24.3 | Normal | 1.5 | 4.2 |
| (OD04340) | | | Stomach | | |
| Kidney Ca, | 0.0 | 3.7 | Gastric Cancer | 0.0 | 0.0 |
| Nuclear grade 3 | | | 9060358 | | |
| (OD04348) | | | | | |
| Kidney Margin | 5.0 | 4.1 | Stomach | 0.0 | 0.0 |
| (OD04348) | | | Margin | | |
| | | | 9060359 | | |
| Kidney Cancer | 45.7 | 0.0 | Gastric Cancer | 1.1 | 7.4 |
| (OD04622-01) | | | 9060395 | | |
| Kidney Margin | 0.0 | 0.0 | Stomach | 4.7 | 8.4 |
| (OD04622-03) | | | Margin | | |
| | | | 9060394 | | |
| Kidney Cancer | 3.0 | 11.7 | Gastric Cancer | 0.0 | 5.7 |
| (OD04450-01) | | | 9060397 | | |
| Kidney Margin | 17.4 | 51.8 | Stomach | 0.0 | 0.0 |
| (OD04450-03) | | | Margin | | |
| | | | 9060396 | | |
| Kidney Cancer | 0.0 | 0.0 | Gastric Cancer | 6.3 | 2.8 |
| 8120607 | | | 064005 | | |

[0773] TABLE 23
Panel 4D

| | Rel. Exp. (%) | Rel. Exp. (%) | | Rel. Exp. (%) | Rel. Exp. (%) |
|---|---|---|---|---|---|
| | Ag2708, Run | Ag299, Run | | Ag2708, Run | Ag299, Run |
| Tissue Name | 153218696 | 162425466 | Tissue Name | 153218696 | 162425466 |
| Secondary Th1 act | 0.0 | 0.0 | HUVEC IL-1beta | 0.0 | 0.0 |
| Secondary Th2 act | 0.0 | 0.0 | HUVEC IFN | 0.0 | 0.0 |
| | | | gamma | | |
| Secondary Tr1 act | 0.0 | 9.4 | HUVEC TNF | 0.0 | 0.0 |
| | | | alpha + IFN | | |
| | | | gamma | | |
| Secondary Th1 rest | 0.0 | 0.0 | HUVEC TNF | 0.0 | 0.0 |
| | | | alpha + IL4 | | |
| Secondary Th2 rest | 0.0 | 0.0 | HUVEC IL-11 | 0.0 | 0.0 |
| Secondary Tr1 rest | 0.0 | 0.0 | Lung | 0.0 | 0.0 |
| | | | Microvascular EC | | |
| | | | none | | |
| Primary Th1 act | 0.0 | 0.0 | Lung | 2.3 | 14.4 |
| | | | Microvascular EC | | |
| | | | TNFalpha + IL- | | |
| | | | 1beta | | |
| Primary Th2 act | 0.0 | 0.0 | Microvascular | 0.0 | 0.0 |
| | | | Dermal EC none | | |
| Primary Tr1 act | 0.0 | 0.0 | Microsvasular | 0.0 | 10.1 |
| | | | Dermal EC | | |
| | | | TNFalpha + IL- | | |
| | | | 1beta | | |
| Primary Th1 rest | 0.0 | 0.0 | Bronchial | 0.0 | 11.7 |
| | | | epithelium | | |
| | | | TNFalpha + | | |
| | | | IL1beta | | |
| Primary Th2 rest | 0.0 | 9.7 | Small airway | 5.8 | 0.0 |
| | | | epithelium none | | |
| Primary Tr1 rest | 9.3 | 0.0 | Small airway | 9.3 | 57.0 |
| | | | epithelium | | |
| | | | TNFalpha + IL- | | |
| | | | 1beta | | |
| CD45RA CD4 | 4.4 | 0.0 | Coronery artery | 0.0 | 0.0 |
| lymphocyte act | | | SMC rest | | |
| CD45RO CD4 | 6.4 | 11.9 | Coronery artery | 0.0 | 0.0 |
| lymphocyte act | | | SMC TNFalpha + | | |
| | | | IL-1beta | | |
| CD8 lymphocyte | 0.0 | 0.0 | Astrocytes rest | 5.5 | 0.0 |
| act | | | | | |
| Secondary CD8 | 0.0 | 0.0 | Astrocytes | 0.0 | 0.0 |
| lymphocyte rest | | | TNFalpha + IL- | | |
| | | | 1beta | | |
| Secondary CD8 | 0.0 | 0.0 | KU-812 | 5.2 | 0.0 |
| lymphocyte act | | | (Basophil) rest | | |
| CD4 lymphocyte | 0.0 | 0.0 | KU-812 | 4.1 | 18.4 |
| none | | | (Basophil) | | |
| | | | PMA/ionomycin | | |
| 2ry | 3.1 | 0.0 | CCD1106 | 0.0 | 0.0 |
| Th1/Th2/Tr1_anti- | | | (Keratinocytes) | | |
| CD95 CH11 | | | none | | |
| LAK cells rest | 0.0 | 0.0 | CCD1106 | 0.0 | 0.0 |
| | | | (Keratinocytes) | | |
| | | | TNFalpha + IL- | | |
| | | | 1beta | | |
| LAK cells IL-2 | 7.4 | 15.8 | Liver cirrhosis | 7.9 | 40.1 |
| LAK cells IL-2 + | 7.2 | 0.0 | Lupus kidney | 8.6 | 0.0 |
| IL-12 | | | | | |
| LAK cells IL-2 + | 17.0 | 0.0 | NCI-H292 none | 4.6 | 19.3 |
| IFN gamma | | | | | |
| LAK cells IL-2 + | 9.4 | 0.0 | NCI-H292 IL-4 | 11.7 | 25.0 |
| IL-18 | | | | | |
| LAK cells | 0.0 | 0.0 | NCI-H292 IL-9 | 0.0 | 0.0 |
| PMA/ionomycin | | | | | |
| NK Cells IL-2 rest | 0.0 | 11.7 | NCI-H292 IL-13 | 0.0 | 0.0 |
| Two Way MLR 3 | 0.0 | 0.0 | NCI-H292 IFN | 0.0 | 9.8 |
| day | | | gamma | | |
| Two Way MLR 5 | 0.0 | 0.0 | HPAEC none | 0.0 | 0.0 |
| day | | | | | |
| Two Way MLR 7 | 14.6 | 5.4 | HPAEC TNF | 3.8 | 0.0 |
| day | | | alpha + IL-1 beta | | |
| PBMC rest | 0.0 | 0.0 | Lung fibroblast | 0.0 | 0.0 |
| | | | none | | |
| PBMC PWM | 4.9 | 0.0 | Lung fibroblast | 15.0 | 0.0 |
| | | | TNF alpha + IL-1 | | |
| | | | beta | | |
| PBMC PHA-L | 0.0 | 8.7 | Lung fibroblast | 0.0 | 17.4 |
| | | | IL-4 | | |
| Ramos (B cell) | 0.0 | 0.0 | Lung fibroblast | 5.4 | 0.0 |
| none | | | IL-9 | | |
| Ramos (B cell) | 2.4 | 0.0 | Lung fibroblast | 0.0 | 0.0 |
| ionomycin | | | IL-13 | | |
| B lymphocytes | 5.4 | 19.9 | Lung fibroblast | 6.5 | 0.0 |
| PWM | | | IFN gamma | | |
| B lymphocytes | 20.4 | 22.2 | Dermal fibroblast | 0.0 | 0.0 |
| CD40L and IL-4 | | | CCD1070 rest | | |
| EOL-1 dbcAMP | 0.0 | 9.6 | Dermal fibroblast | 5.8 | 6.3 |
| | | | CCD1070 TNF | | |
| | | | alpha | | |
| EOL-1 dbcAMP | 0.0 | 0.0 | Dermal fibroblast | 0.0 | 0.0 |
| PMA/ionomycin | | | CCD1070 IL-1 | | |
| | | | beta | | |
| Dendritic cells | 4.7 | 12.0 | Dermal fibroblast | 0.0 | 9.2 |
| none | | | IFN gamma | | |
| Dendritic cells LPS | 0.0 | 0.0 | Dermal fibroblast | 0.0 | 6.3 |
| | | | IL-4 | | |
| Dendritic cells anti- | 0.0 | 6.4 | IBD Colitis 2 | 6.3 | 12.7 |
| CD40 | | | | | |
| Monocytes rest | 0.0 | 0.0 | IBD Crohn's | 0.0 | 0.0 |
| Monocytes LPS | 0.0 | 0.0 | Colon | 0.0 | 0.0 |
| Macrophages rest | 0.0 | 21.0 | Lung | 0.0 | 0.0 |
| Macrophages LPS | 0.0 | 0.0 | Thymus | 100.0 | 100.0 |
| HUVEC none | 0.0 | 0.0 | Kidney | 9.3 | 0.0 |
| HUVEC starved | 0.0 | 11.1 | | | |

[0774] CNS_neurodegeneration_v1.0 Summary: Ag299/Ag2708 Two experiments with two different probe and primer sets show that the NOV9 gene is expressed in the brain. However, no difference is detected in the expression of this gene in the postmortem brains of Alzheimer's diseased patients when compared to controls. Please see Panel 1.2 for discussion of utility of this gene in the central nervous system.

[0775] Panel 1 Summary: Ag299 The NOV9 gene is expressed at low and in roughly equivalent amounts throughout much of the CNS, including in amygdala, cerebellum, hippocampus, substantia nigra, and thalamus (see Panel 1.2 Summary for potential utility).

[0776] In addition, NOV9 gene expression is detected at low levels in pancreas (CT=33), adrenal gland (CT=33), thyroid (CT=33), liver (CT=34), and hypothalamus (CT=33) suggesting that this gene may play a role in neuroendocrine disorders or metabolic diseases, including diabetes and obesity.

[0777] Interestingly, the NOV9 gene appears to be overexpressed in a number of liver cancer, lung cancer, and ovarian cancer cell lines relative to their respective normal controls. It is also expressed at high levels in a single melanoma cell line. These observations suggest that the therapeutic inhibition of this gene activity, through the use of small molecule drugs or antibodies, may provide treatment of the cancers listed above. In contrast, NOV9 gene expression appears to be downregulated in colon cancer cell lines and kidney cancer cell lines relative to normal controls. Therefore, therapeutic up-regulation of the activity of the NOV9 gene, through the application of the protein product or agonists might be of use in the treatment of kidney and colon cancers.

[0778] Panel 1.2 Summary: Ag1347 Results from two experiments using the same probe/primer set are reasonably concordant and the results are consistent with what was observed in Panel 1. Expression of the NOV9 gene in this panel is skewed by genomic DNA contamination in the adipose sample. Disregarding this sample, low but detectable expression is present in several CNS samples, namely cerebral cortex (CT=33.1), hippocampus (CT=33.3) and thalamus (CT=34.1). Several neurotransmitter receptors are GPCRs, including the dopamine receptor family, the serotonin receptor family, the GABAB receptor, muscarinic acetylcholine receptors, and others; thus the GPCR encoded by the NOV9 gene may represent a novel neurotransmitter receptor. Targeting various neurotransmitter receptors (dopamine, serotonin) has proven to be an effective therapy in psychiatric illnesses such as schizophrenia and depression. Furthermore the cerebral cortex and hippocampus are regions of the brain that are known to play critical roles in Alzheimer's disease, seizure disorders, and in the normal process of memory formation. Therefore, therapeutic modulation of the NOV9 gene or its protein product may be beneficial in one or more of these diseases, as may stimulation and/or blockade of the receptor coded for by the gene.

[0779] In addition, NOV9 gene expression is detected in adrenal gland (CT=33.6), thyroid (CT=34), and pituitary gland (CT,=34), suggesting that this gene may play a role in neuroendocrine disorders or metabolic diseases, including diabetes and obesity. The NOV9 transcript is present at very low levels in a number of other normal tissues including colon, kidney, placenta, prostate and testis.

[0780] Highest expression of the NOV9 gene is seen in ovarian and lung cancer cell lines. However, this gene is also expressed in a number of other cancer cell lines, including melanoma, breast, colon, and liver. Therefore, the therapeutic inhibition of this gene activity, through the use of small molecule drugs or antibodies, may provide treatment of the cancers listed above.

[0781] References:

[0782] El Yacoubi M, Ledent C, Parmentier M, Bertorelli R, Ongini E, Costentin J, Vaugeois J M. Adenosine A2A receptor antagonists are potential antidepressants: evidence based on pharmacology and A2A receptor knockout mice. Br J Pharmacol September 2001;134(l):68-77

[0783] 1. Adenosine, an ubiquitous neuromodulator, and its analogues have been shown to produce ‘depressant’ effects in animal models believed to be relevant to depressive disorders, while adenosine receptor antagonists have been found to reverse adenosine-mediated ‘depressant’effect. 2. We have designed studies to assess whether adenosine A2A receptor antagonists, or genetic inactivation of the receptor would be effective in established screening procedures, such as tail suspension and forced swim tests, which are predictive of clinical antidepressant activity. 3. Adenosine A2A receptor knockout mice were found to be less sensitive to ‘depressant’ challenges than their wildtype littermates. Consistently, the adenosine A2A receptor blockers SCH 58261 (1-10 mg kg(−1), i.p.) and KW 6002 (0.1-10 mg kg(−1), p.o.) reduced the total immobility time in the tail suspension test. 4. The efficacy of adenosine A2A receptor antagonists in reducing immobility time in the tail suspension test was confirmed and extended in two groups of mice. Specifically, SCH 58261 (1-10 mg kg(−1)) and ZM 241385 (15-60 mg kg(−1)) were effective in mice previously screened for having high immobility time, while SCH 58261 at 10 mg kg(−1) reduced immobility of mice that were selectively bred for their spontaneous ‘helplessness’ in this assay. 5. Additional experiments were carried out using the forced swim test. SCH 58261 at 10 mg kg(−1) reduced the immobility time by 61%, while KW 6002 decreased the total immobility time at the doses of 1 and 10 mg kg(-1) by 75 and 79%, respectively. 6. Administration of the dopamine D2 receptor antagonist haloperidol (50-200 microg kg(−1) i.p.) prevented the antidepressant-like effects elicited by SCH 58261 (10 mg kg(−1) i.p.) in forced swim test whereas it left unaltered its stimulant motor effects. 7. In conclusion, these data support the hypothesis that A2A receptor antagonists prolong escape-directed behaviour in two screening tests for antidepressants. Altogether the results support the hypothesis that blockade of the adenosine A2A receptor might be an interesting target for the development of effective antidepressant agents.

[0784] Blier P. Pharmacology of rapid-onset antidepressant treatment strategies. Clin Psychiatry 2001;62 Suppl 15:12-7

[0785] Although selective serotonin reuptake inhibitors (SSRIs) block serotonin (5-HT) reuptake rapidly, their therapeutic action is delayed. The increase in synaptic 5-HT activates feedback mechanisms mediated by 5-HT1A (cell body) and 5-HT1B (terminal) autoreceptors, which, respectively, reduce the firing in 5-HT neurons and decrease the amount of 5-HT released per action potential resulting in attenuated 5-HT neurotransmission. Long-term treatment desensitizes the inhibitory 5-HT1 autoreceptors, and 5-HT neurotransmission is enhanced. The time course of these events is similar to the delay of clinical action. The addition of pindolol, which blocks 5-HTIA receptors, to SSRI treatment decouples the feedback inhibition of 5-HT neuron firing and accelerates and enhances the antidepressant response. The neuronal circuitry of the 5-HT and norepinephrine (NE) systems and their connections to forebrain areas believed to be involved in depression has been dissected. The firing of 5-HT neurons in the raphe nuclei is driven, at least partly, by alpha1-adrenoceptor-mediated excitatory inputs from NE neurons. Inhibitory alpha2-adrenoceptors on the NE neuroterminals form part of a feedback control mechanism. Mirtazapine, an antagonist at alpha2-adrenoceptors, does not enhance 5-HT neurotransmission directly but disinhibits the NE activation of 5-HT neurons and thereby increases 5-HT neurotransmission by a mechanism that does not require a time-dependent desensitization of receptors. These neurobiological phenomena may underlie the apparently faster onset of action of mirtazapine compared with the SSRIs.

[0786] Tranquillini M E, Reggiani A. Glycine-site antagonists and stroke. Expert Opin Investig Drugs November 1999;8(11):1837-1848

[0787] The excitatory amino acid, (S)-glutamic acid, plays an important role in controlling many neuronal processes. Its action is mediated by two main groups of receptors: the ionotropic receptors (which include NMDA, AMPA and kainic acid subtypes) and the metabotropic receptors (mGluR(1-8)) mediating G-protein coupled responses. This review focuses on the strychnine insensitive glycine binding site located on the NMDA receptor channel, and on the possible use of selective antagonists for the treatment of stroke. Stroke is a devastating disease caused by a sudden vascular accident. Neurochemically, a massive release of glutamate occurs in neuronal tissue; this overactivates the NMDA receptor, leading to increased intracellular calcium influx, which causes neuronal cell death through necrosis. NMDA receptor activation strongly depends upon the presence of glycine as a co-agonist. Therefore, the administration of a glycine antagonist can block overactivation of NMDA receptors, thus preserving neurones from damage. The glycine antagonists currently identified can be divided into five main categories depending on their chemical structure: indoles, tetrahydroquinolines, benzoazepines, quinoxalinediones and pyrida-zinoquinolines.

[0788] Monopoli A, Lozza G, Forlani A, Mattavelli A, Ongini E. Blockade of adenosine A2A receptors by SCH 58261 results in neuroprotective effects in cerebral ischaemia in rats. Neuroreport Dec. 1, 1998;9(17):3955-9

[0789] Blockade of adenosine receptors can reduce cerebral infarct size in the model of global ischaemia. Using the potent and selective A2A adenosine receptor antagonist, SCH 58261, we assessed whether A2A receptors are involved in the neuronal damage following focal cerebral ischaemia as induced by occluding the left middle cerebral artery. SCH 58261 (0.01 mg/kg either i.p. or i.v.) administered to normotensive rats 10 min after ischaemia markedly reduced cortical infarct volume as measured 24 h later (30% vs controls, p<0.05). Similar effects were observed when SCH 58261 (0.01 mg/kg, i.p.) was administered to hypertensive rats (28% infarct volume reduction vs controls, p <0.05). Neuroprotective properties of SCH 58261 administered after ischaemia indicate that blockade of A2A adenosine receptors is a potentially useful biological target for the reduction of brain injury.

[0790] Panel 1.3D Summary: Ag299 Three experiments with the same probe and primer set show highest expression of the NOV9 gene in the testis, fetal skeletal muscle and an ovarian cancer line (CTs=33-34). Significant expression is also seen in a lung cancer cell line. Thus, the expression of the gene could be used to distinguish these samples from other samples in the panel. In addition, and more specifically, the expression of this gene could also be used to distinguish fetal skeletal muscle from adult skeletal muscle. Moreover, therapeutic modulation of this gene, through the use of small molecule drugs, antibodies or protein therapeutics might be of use in the treatment of lung or ovarian cancer.

[0791] In addition, the higher levels of expression in fetal skeletal muscle (CTs=33) when compared to adult skeletal muscle (CTs=40) suggest that this gene product may be involved in the development and homeostasis of this organ. Thus, therapeutic modulation of the expression or function of this gene may be useful in restoring muscle mass or function to weak or dystrophic muscle.

[0792] Please note that data from a third experiment with the probe and primer set Ag2708 shows expression that is low/undetectable in all samples on this panel (CTs>35). (Data not shown.)

[0793] Panel 2.2 Summary: Ag2708 Expression of the NOV9 gene is low/undetectable (CT values >34.5) in all of the samples on this panel.

[0794] Panel 2D Summary: Ag299/Ag2708 Two experiments with two different probe and primer sets low show overall expression of the NOV9 gene on this panel. The highest expression is in a sample derived from prostate cancer tissue (CT=33) and breast cancer tissue (CT=30.7). There are several other cancer tissues (bladder, breast, uterus, kidney and colon cancers) that also express this gene. In addition, the NOV9 transcript is detected in many normal tissues, including stomach, liver, breast, lung, kidney and thyroid. Interestingly, five kidney cancer tissues show overexpression of the NOV9 gene relative to their normal adjacent tissues. Thus, therapeutic up-regulation of the activity of this gene, through the application of the protein product or agonists might be of use in the treatment of kidney cancer. Alternatively, down-regulation of the activity of this gene, through the use of antibodies or small molecule drugs might be of use in the treatment of prostate, bladder, breast, uterus and colon cancers.

[0795] Panel 3D Summary: Ag2708 Expression of this gene is low/undetectable (CT values >34.5) in all of the samples on this panel.

[0796] Panel 4D Summary: Ag299/Ag2708 The NOV9 transcript is expressed at significant levels only in the thymus (CT=34) in both runs. The putative GPCR encoded for by the NOV9 gene could therefore play an important role in T cell development. Small molecule therapeutics, or antibody therapeutics designed against the GPCR encoded for by this gene could be utilized to modulate immune function (T cell development) and be important for organ transplant, AIDS treatment or post chemotherapy immune reconstitution.

[0797] NOV8

[0798] Expression of gene NOV8 was assessed using the primer-probe sets Ag2597 and Ag5234, described in Tables 24 and 25. Results of the RTQ-PCR runs are shown in Tables 26 and 27.

TABLE 24
Probe Name Ag2597

| Primers | Sequences | Length | Start Position | SEQ ID NO: |
|---|---|---|---|---|
| Forward | 5′-ggagctttctgggaagactct-3′ | 21 | 11 | 169 |
| Probe | TET-5′-tagaaaatgcacaggagcactccacg-3′-TAMRA | 26 | 32 | 170 |
| Reverse | 5′-caaaatgcggaagatgaaca-3′ | 20 | 86 | 171 |

[0799] TABLE 25
Probe Name Ag5234

| | | | | |
|---|---|---|---|---|
| Primers | Sequences | Length | Start Positon | SEQ ID NO: |

| | | | | |
|---|---|---|---|---|
| Forward | 5′-cttcatcatcttcatgctggcg-3′ | 22 | 606 | 172 |
| Probe | TET-5′-cactgctgctcaacatgctggagatata-3′-TAMRA | 28 | 641 | 173 |
| Reverse | 5′ggctggtcacgccctgctt-3′ | 19 | 691 | 174 |

[0800] TABLE 26
General_screening_panel_v1.5

| | Rel. Exp. (%) Ag5234, | | Rel. Exp. (%) Ag5234, |
|---|---|---|---|
| Tissue Name | Run 229514466 | Tissue Name | Run 229514466 |
| Adipose | 0.0 | Renal ca. TK-10 | 0.0 |
| Melanoma* | 1.4 | Bladder | 1.8 |
| Hs688(A).T | | | |
| Melanoma* | 0.8 | Gastric ca. (liver met.) | 6.3 |
| Hs688(B).T | | NCI-N87 | |
| Melanoma*M14 | 40.1 | Gastric ca. KATO III | 0.7 |
| Melanoma* | 2.0 | Colon ca. SW-948 | 0.0 |
| LOXIMVI | | | |
| Melanoma* SK- | 32.1 | Colon ca. SW480 | 100.0 |
| MEL-5 | | | |
| Squamous cell | 3.4 | Colon ca.* (SW480 | 0.0 |
| carcinoma SCC-4 | | met) SW620 | |
| Testis Pool | 1.6 | Colon ca. HT29 | 0.0 |
| Prostate ca.* (bone | 3.5 | Colon ca. HCT-116 | 67.8 |
| met) PC-3 | | | |
| Prostate Pool | 0.0 | Colon ca. CaCo-2 | 0.0 |
| Placenta | 1.2 | Colon cancer tissue | 0.0 |
| Uterus Pool | 0.3 | Colon ca. SW1116 | 10.9 |
| Ovarian ca. | 0.8 | Colon ca. Colo-205 | 0.0 |
| OVCAR-3 | | | |
| Ovarian ca. SK-OV-3 | 52.5 | Colon ca. SW-48 | 0.0 |
| Ovarian ca. | 6.5 | Colon Pool | 3.6 |
| OVCAR-4 | | | |
| Ovarian ca. | 15.2 | Small Intestine Pool | 2.1 |
| OVCAR-5 | | | |
| Ovarian ca. IGROV-1 | 4.9 | Stomach Pool | 0.8 |
| Ovarian ca. | 12.9 | Bone Marrow Pool | 0.0 |
| OVCAR-8 | | | |
| Ovary | 0.0 | Fetal Heart | 61.1 |
| Breast ca. MCF-7 | 0.0 | Heart Pool | 5.8 |
| Breast ca. MDA- | 42.9 | Lymph Node Pool | 0.1 |
| MB-231 | | | |
| Breast ca. BT 549 | 0.9 | Fetal Skeletal Muscle | 0.4 |
| Breast ca. T47D | 1.0 | Skeletal Muscle Pool | 0.0 |
| Breast ca. MDA-N | 0.0 | Spleen Pool | 0.0 |
| Breast Pool | 3.8 | Thymus Pool | 0.5 |
| Trachea | 0.7 | CNS cancer (glio/astro) | 0.0 |
| | | U87-MG | |
| Lung | 0.0 | CNS cancer (glio/astro) | 1.3 |
| | | U-118-MG | |
| Fetal Lung | 0.0 | CNS cancer | 0.0 |
| | | (neuro; met) SK-N-AS | |
| Lung ca. NCI-N417 | 0.5 | CNS cancer (astro) SF- | 0.4 |
| | | 539 | |
| Lung ca. LX-1 | 0.6 | CNS cancer (astro) | 0.5 |
| | | SNB-75 | |
| Lung ca. NCI-H146 | 0.0 | CNS cancer (glio) | 3.4 |
| | | SNB-19 | |
| Lung ca. SHP-77 | 0.0 | CNS cancer (glio) SF- | 4.3 |
| | | 295 | |
| Lung ca. A549 | 0.7 | Brain (Amygdala) Pool | 0.3 |
| Lung ca. NCI-H526 | 0.0 | Brain(cerebellum) | 0.0 |
| Lung ca. NCI-H23 | 12.7 | Brain (fetal) | 0.0 |
| Lung ca. NCI-H460 | 1.6 | Brain (Hippocampus) | 0.2 |
| | | Pool | |
| Lung ca. HOP-62 | 3.6 | Cerebral Cortex Pool | 0.0 |
| Lung ca. NCI-H522 | 16.3 | Brain (Substantia nigra) | 0.0 |
| | | Pool | |
| Liver | 0.0 | Brain (Thalamus) Pool | 0.0 |
| Fetal Liver | 0.7 | Brain (whole) | 0.0 |
| Liver ca. HepG2 | 0.6 | Spinal Cord Pool | 0.0 |
| Kidney Pool | 1.5 | Adrenal Gland | 0.0 |
| Fetal Kidney | 6.8 | Pituitary gland Pool | 0.0 |
| Renal ca. 786-0 | 0.6 | Salivary Gland | 0.0 |
| Renal ca. A498 | 0.0 | Thyroid (female) | 0.0 |
| Renal ca. ACHN | 0.0 | Pancreatic ca. CAPAN2 | 26.2 |
| Renal ca. UO-31 | 0.0 | Pancreas Pool | 3.5 |

[0801] TABLE 27
Panel 4.1D

| | Rel. Exp. (%) | | Rel. Exp. (%) |
|---|---|---|---|
| | Ag5234, Run | | Ag5234, Run |
| Tissue Name | 229788208 | Tissue Name | 229788208 |
| Secondary Th1 act | 2.6 | HUVEC IL-1beta | 0.0 |
| Secondary Th2 act | 0.0 | HUVEC IFN gamma | 0.0 |
| Secondary Tr1 act | 0.0 | HUVEC TNF alpha + IFN | 0.0 |
| | | gamma | |
| Secondary Th1 rest | 0.0 | HUVEC TNF alpha + IL4 | 0.0 |
| Secondary Th2 rest | 0.0 | HUVEC IL-11 | 0.0 |
| Secondary Tr1 rest | 0.0 | Lung Microvascular EC | 0.0 |
| | | none | |
| Primary Th1 act | 0.0 | Lung Microvascular EC | 0.0 |
| | | TNFalpha + IL-1beta | |
| Primary Th2 act | 0.0 | Microvascular Dermal EC | 0.0 |
| | | none | |
| Primary Tr1 act | 0.0 | Microvascular Dermal EC | 0.0 |
| | | TNFalpha + IL-1beta | |
| Primary Th1 rest | 0.0 | Bronchial epithelium | 0.0 |
| | | TNFalpha + IL1beta | |
| Primary Th2 rest | 0.0 | Small airway epithelium | 0.0 |
| | | none | |
| Primary Tr1 rest | 0.0 | Small airway epithelium | 8.4 |
| | | TNFalpha + IL-1beta | |
| CD45RA CD4 | 0.0 | Coronery artery SMC rest | 0.0 |
| lymphocyte act | | | |
| CD45RO CD4 | 0.0 | Coronery artery SMC | 0.0 |
| lymphocyte act | | TNFalpha + IL-1beta | |
| CD8 lymphocyte act | 0.0 | Astrocytes rest | 4.8 |
| Secondary CD8 | 1.6 | Astrocytes TNFalpha + | 6.5 |
| lymphocyte rest | | IL-1beta | |
| Secondary CD8 | 0.0 | KU-812 (Basophil) rest | 0.0 |
| lymphocyte act | | | |
| CD4 lymphocyte none | 1.6 | KU-812 (Basophil) | 0.0 |
| | | PMA/ionomycin | |
| 2ry Th1/Th2/Tr1_anti- | 0.0 | CCD1106 (Keratinocytes) | 9.2 |
| CD95 CH11 | | none | |
| LAK cells rest | 0.0 | CCD1106 (Keratinocytes) | 0.0 |
| | | TNFalpha + IL-1beta | |
| LAK cells IL-2 | 0.0 | Liver cirrhosis | 0.0 |
| LAK cells IL-2 + IL-12 | 1.1 | NCI-H292 none | 0.0 |
| LAK cells IL-2 + IFN | 0.0 | NCI-H292 IL-4 | 0.0 |
| gamma | | | |
| LAK cells IL-2 + IL-18 | 0.0 | NCI-H292 IL-9 | 0.0 |
| LAK cells | 2.5 | NCI-H292 IL-13 | 2.7 |
| PMA/ionomycin | | | |
| NK Cells IL-2 rest | 0.0 | NCI-H292 IFN gamma | 0.0 |
| Two Way MLR 3 day | 1.5 | HPAEC none | 0.0 |
| Two Way MLR 5 day | 0.0 | HPAEC TNF alpha + IL-1 | 0.0 |
| | | beta | |
| Two Way MLR 7 day | 0.0 | Lung fibroblast none | 8.7 |
| PBMC rest | 0.0 | Lung fibroblast TNF | 17.0 |
| | | alpha + IL-1 beta | |
| PBMC PWM | 1.2 | Lung fibroblast IL-4 | 2.1 |
| PBMC PHA-L | 8.4 | Lung fibroblast IL-9 | 6.1 |
| Ramos (B cell) none | 0.0 | Lung fibroblast IL-13 | 0.0 |
| Ramos (B cell) | 0.0 | Lung fibroblast IFN | 6.3 |
| ionomycin | | gamma | |
| B lymphocytes PWM | 0.0 | Dermal fibroblast | 0.0 |
| | | CCD1070 rest | |
| B lymphocytes CD40L | 0.0 | Dermal fibroblast | 3.4 |
| and IL-4 | | CCD1070 TNF alpha | |
| EOL-1 dbcAMP | 0.0 | Dermal fibroblast | 3.9 |
| | | CCD1070 IL-1 beta | |
| EOL-1 dbcAMP | 0.0 | Dermal fibroblast IFN | 8.6 |
| PMA/ionomycin | | gamma | |
| Dendritic cells none | 0.0 | Dermal fibroblast IL-4 | 3.2 |
| Dendritic cells LPS | 0.0 | Dermal Fibroblasts rest | 1.8 |
| Dendritic cells anti- | 0.0 | Neutrophils TNFa + LPS | 0.0 |
| CD40 | | | |
| Monocytes rest | 0.0 | Neutrophils rest | 0.0 |
| Monocytes LPS | 100.0 | Colon | 0.0 |
| Macrophages rest | 0.0 | Lung | 0.0 |
| Macrophages LPS | 0.0 | Thymus | 0.0 |
| HUVEC none | 0.0 | Kidney | 2.4 |
| HUVEC starved | 0.0 | | |

[0802] CNS_neurodegeneration_v1.0 Summary: Ag2597/Ag5234 Expression of the NOV8 gene is low/undetectable in all samples on this panel (CTs>35). (Data not shown.)

[0803] General_screening_panel_v1.5 Summary: Ag5234 The expression of the NOV8 gene appears to be highest in a sample derived from a colon cancer cell line (SW480)(CT=30.4). In addition, there is substantial expression associated with two other colon cancer cell lines, a pancreatic cancer cell line, two lung cancer cell lines, a breast cancer cell line, two melanoma cell lines and a cluster of several ovarian cancer cell lines. Thus, the expression of this gene could be used to distinguish the above samples from the other samples in the panel. Moreover, therapeutic modulation of this gene, through the use of small molecule drugs, antibodies or protein therapeutics might be of benefit in the treatment of ovarian, colon, pancreatic, lung, breast cancers or melanoma.

[0804] This gene is also expressed at moderate levels in fetal heart (CT=31.1) and at lower levels in the adult heart (CT=34.5). Thus, expression of this gene may be used to differentiate between fetal and adult heart tissue. Furthermore, the higher levels of expression in fetal heart suggest that the protein encoded by this gene may be important for the pathogenesis, diagnosis, and/or treatment of diseases of the heart.

[0805] Panel 1.3D Summary: Ag2597 Expression of the NOV8 gene is low/undetectable in all samples on this panel (CTs>35). (Data not shown.). The amp plot suggests that there is a high probability of a probe failure with this probe and primer set.

[0806] Panel 2.2 Summary: Ag2597 Expression of the NOV8 gene is low/undetectable in all samples on this panel (CTs>35). (Data not shown.) The amp plot suggests that there is a high probability of a probe failure with this probe and primer set.

[0807] Panel 4.1D Summary: Ag 5234 Highest expression of the NOV8 transcript is in monocytes stimulated with LPS (CT=32.9). Upon activation with pathogens, including bacterial LPS, monocytes contribute to the innate and specific immunity by migrating to the site of tissue injury and releasing inflammatory cytokines. This release contributes to the inflammation process. This transcript encodes for a connexin like protein, a family of proteins that is involved in gap junction and intercellular communication. Thus, the protein encoded by this transcript may play a role in the interaction of activated monocytes with the endothelium.

[0808] This is the first step necessary for the migration of these cells to injured tissue. Therefore, modulation of the expression of the protein encoded by this transcript, by antibodies or small molecules can prevent the recruitment of monocytes and the inflammatory process, and lead to improvement of the symptoms of patients suffering from autoimmune and inflammatory diseases such as asthma, allergies, inflammatory bowel disease, lupus erythematosus, or rheumatoid arthritis.

[0809] Panel 4D Summary: Ag2597 Expression of the NOV8 gene is low/undetectable in all samples on this panel (CTs>35). (Data not shown.) The amp plot suggests that there is a high probability of a probe failure with this probe and primer set.

[0810] NOV7

[0811] Expression of gene NOV7 was assessed using the primer-probe sets Ag48l 1, Ag4845 and Ag4944, described in Tables 28, 29 and 30. Results of the RTQ-PCR runs are shown in 30 Tables 31, 32 and 33.

TABLE 28

Probe Name Ag4811

| | | | | |
|---|---|---|---|---|
| Primers | Sequences | Length | Start Positon | SEQ ID NO: |

| | | | | |
|---|---|---|---|---|
| Forward | 5′-catgtctcttttcgggaacata-3′ | 22 | 791 | 175 |
| Probe | TET-5′-cacagtaaacatcaccttcttggaagtg-3′-TAMRA | 28 | 820 | 176 |
| Reverse | 5′gaaggccataatcttccatttt-3′ | 22 | 848 | 177 |

[0812] TABLE 29

Probe Name Ag4845

| | | | | |
|---|---|---|---|---|
| Primers | Sequences | Length | Start Positon | SEQ ID NO: |

| | | | | |
|---|---|---|---|---|
| Forward | 5′-catgtctcttttcgggaacata-3′ | 22 | 791 | 178 |
| Probe | TET-5′-cacagtaaacatcaccttcttggaagtg-3′-TAMRA | 28 | 820 | 179 |
| Reverse | 5′gaaggccataatcttccatttt-3′ | 22 | 848 | 180 |

[0813] TABLE 30

Probe Name Ag4944

| | | | | |
|---|---|---|---|---|
| Primers | Sequences | Length | Start Positon | SEQ ID NO: |

| | | | | |
|---|---|---|---|---|
| Forward | 5′-cagggaagcagtacgaggttt-3′ | 21 | 537 | 181 |
| Probe | TET-5′-tggaggaagtgtccctaaaatcatttatcc-3′- | 30 | 598 | 182 |
| | TAMRA | | | |
| Reverse | 5′tgactctccagcatgctaga-3′ | 20 | 709 | 183 |

[0814] TABLE 31
General_screening_panel_v1.4

| | Rel. Exp. (%) Ag4811, | | Rel. Exp. (%) Ag4811, |
|---|---|---|---|
| Tissue Name | Run 223204488 | Tissue Name | Run 233204488 |
| Adipose | 4.9 | Renal ca. TK-10 | 71.7 |
| Melanoma* | 1.4 | Bladder | 6.5 |
| Hs688(A).T | | | |
| Melanoma* | 2.9 | Gastric ca. (liver met). | 100.0 |
| Hs688(B).T | | NCI-N87 | |
| Melanoma* M14 | 0.0 | Gastric ca. KATO III | 24.1 |
| Melanoma* | 0.0 | Colon ca. SW-948 | 2.4 |
| LOXIMVI | | | |
| Melanoma* SK- | 0.0 | Colon ca. SW480 | 7.1 |
| MEL-5 | | | |
| Squamous cell | 45.4 | Colon ca.* (SW480 | 0.5 |
| carcinoma SCC-4 | | met) SW620 | |
| Testis Pool | 1.7 | Colon ca. HT29 | 16.8 |
| Prostate ca.* (bone | 0.0 | Colon ca. HCT-116 | 0.0 |
| met) PC-3 | | | |
| Prostate Pool | 2.7 | Colon ca. CaCo-2 | 0.5 |
| Placenta | 0.5 | Colon cancer tissue | 12.1 |
| Uterus Pool | 0.4 | Colon ca. SW1116 | 6.9 |
| Ovarian ca. | 1.4 | Colon ca. Colo-205 | 3.7 |
| OVCAR-3 | | | |
| Ovarian ca. SK-OV-3 | 0.3 | Colon ca. SW-48 | 0.0 |
| Ovarian ca. | 45.1 | Colon Pool | 1.6 |
| OVCAR-4 | | | |
| Ovarian ca. | 0.0 | Small Intestine Pool | 1.2 |
| OVCAR-5 | | | |
| Ovarian ca. IGROV-1 | 0.4 | Stomach Pool | 7.0 |
| Ovarian ca. | 25.9 | Bone Marrow Pool | 3.1 |
| OVCAR-8 | | | |
| Ovary | 6.0 | Fetal Heart | 0.4 |
| Breast ca. MCF-7 | 0.0 | Heart Pool | 1.3 |
| Breast ca. MDA- | 32.1 | Lymph Node Pool | 2.8 |
| MB-231 | | | |
| Breast ca. BT 549 | 10.9 | Fetal Skeletal Muscle | 0.6 |
| Breast ca. T47D | 1.2 | Skeletal Muscle Pool | 3.0 |
| Breast ca. MDA-N | 0.0 | Spleen Pool | 4.2 |
| Breast Pool | 6.3 | Thymus Pool | 3.8 |
| Trachea | 8.1 | CNS cancer (glio/astro) | 0.2 |
| | | U87-MG | |
| Lung | 0.1 | CNS cancer (glio/astro) | 0.8 |
| | | U-118-MG | |
| Fetal Lung | 5.3 | CNS cancer | 0.3 |
| | | (neuro; met) SK-N-AS | |
| Lung ca. NCI-N417 | 0.0 | CNS cancer (astro) SF- | 0.4 |
| | | 539 | |
| Lung ca. LX-1 | 3.9 | CNS cancer (astro) | 4.9 |
| | | SNB-75 | |
| Lung ca. NCI-H146 | 0.0 | CNS cancer (glio) | 0.0 |
| | | SNB-19 | |
| Lung ca. SHP-77 | 0.0 | CNS cancer (glio) SF- | 0.0 |
| | | 295 | |
| Lung ca. A549 | 0.1 | Brian (Amygdala) Pool | 4.6 |
| Lung ca. NCI-H526 | 0.0 | Brain (cerebellum) | 0.4 |
| Lung ca. NCI-H23 | 3.8 | Brain (fetal) | 4.7 |
| Lung ca. NCI-H460 | 0.0 | Brain (Hippocampus) | 3.0 |
| | | Pool | |
| Lung ca. HOP-62 | 0.1 | Cerebral Cortex Pool | 6.9 |
| Lung ca. NCI-H522 | 0.0 | Brain (Substantia nigra) | 4.9 |
| | | Pool | |
| Liver | 1.2 | Brain (Thalamus) Pool | 9.2 |
| Fetal Liver | 4.3 | Brain (whole) | 7.0 |
| Liver ca. HepG2 | 0.0 | Spinal Cord Pool | 0.8 |
| Kidney Pool | 3.2 | Adrenal Gland | 12.5 |
| Fetal Kidney | 5.1 | Pituitary gland Pool | 0.1 |
| Renal ca. 786-0 | 0.0 | Salivary Gland | 2.8 |
| Renal ca. A498 | 0.0 | Thyroid (female) | 6.3 |
| Renal ca. ACHN | 0.0 | Pancreatic ca. CAPAN2 | 0.0 |
| Renal ca. UO-31 | 5.3 | Pancreas Pool | 21.0 |

[0815] TABLE 32
General_screening_panel_v1.5

| | Rel. Exp. (%) Ag4845, | | Rel. Exp. (%) Ag4845, |
|---|---|---|---|
| Tissue Name | Run 228796340 | Tissue Name | Run 228796340 |
| Adipose | 5.8 | Renal ca. TK-10 | 59.0 |
| Melanoma* | 1.9 | Bladder | 5.5 |
| Hs688(A).T | | | |
| Melanoma* | 1.8 | Gastric ca. (liver met.) | 100.0 |
| Hs688(B).T | | NCI-N87 | |
| Melanoma* M14 | 0.0 | Gastric ca. KATO III | 16.3 |
| Melanoma* | 0.0 | Colon ca. SW-948 | 1.1 |
| LOXIMVI | | | |
| Melanoma* SK- | 0.0 | Colon ca. SW480 | 5.1 |
| MEL-5 | | | |
| Squamous cell | 34.9 | Colon ca.* (SW480 | 0.0 |
| carcinoma SCC-4 | | met) SW620 | |
| Testis Pool | 0.9 | Colon ca. HT29 | 16.7 |
| Prostate ca.* (bone | 0.0 | Colon ca. HCT-116 | 0.0 |
| met) PC-3 | | | |
| Prostate Pool | 1.2 | Colon ca. CaCo-2 | 0.0 |
| Placenta | 0.5 | Colon cancer tissue | 9.2 |
| Uterus Pool | 0.4 | Colon ca. SW1116 | 6.0 |
| Ovarian ca. | 0.6 | Colon ca. Colo-205 | 3.6 |
| OVCAR-3 | | | |
| Ovarian ca. SK-OV-3 | 0.3 | Colon ca. SW-48 | 0.0 |
| Ovarian ca. | 36.3 | Colon Pool | 2.9 |
| OVCAR-4 | | | |
| Ovarian ca. | 0.1 | Small Intestine Pool | 0.8 |
| OVCAR-5 | | | |
| Ovarian ca. IGROV-1 | 0.7 | Stomach Pool | 4.6 |
| Ovarian ca. | 20.2 | Bone Marrow Pool | 1.7 |
| OVCAR-8 | | | |
| Ovary | 3.5 | Fetal Heart | 1.0 |
| Breast ca. MCF-7 | 0.0 | Heart Pool | 1.0 |
| Breast ca. MDA- | 18.2 | Lymph Node Pool | 2.1 |
| MB-231 | | | |
| Breast ca. BT 549 | 6.2 | Fetal Skeletal Muscle | 0.7 |
| Breast ca. T47D | 0.7 | Skeletal Muscle Pool | 3.0 |
| Breast ca. MDA-N | 0.0 | Spleen Pool | 2.6 |
| Breast Pool | 4.6 | Thymus Pool | 3.4 |
| Trachea | 4.5 | CNS cancer (glio/astro) | 0.3 |
| | | U87-MG | |
| Lung | 0.2 | CNS cancer (glio/astro) | 0.9 |
| | | U-118-MG | |
| Fetal Lung | 4.1 | CNS cancer | 0.2 |
| | | (neuro; met) SK-N-AS | |
| Lung ca. NCI-N417 | 0.0 | CNS cancer (astro) SF- | 0.0 |
| | | 539 | |
| Lung ca. LX-1 | 3.1 | CNS cancer (astro) | 3.0 |
| | | SNB-75 | |
| Lung ca. NCI-H146 | 0.0 | CNS cancer (glio) | 0.0 |
| | | SNB-19 | |
| Lung ca. SHP-77 | 0.0 | CNS cancer (glio) SF- | 0.0 |
| | | 295 | |
| Lung ca. A549 | 0.2 | Brain (Amygdala) Pool | 1.3 |
| Lung ca NCI-H526 | 0.1 | Brain (cerebellum) | 1.6 |
| Lung ca. NCI-H23 | 3.6 | Brain (fetal) | 2.8 |
| Lung ca. NCI-H460 | 0.0 | Brain (Hippocampus) | 2.0 |
| | | Pool | |
| Lung ca. HOP-62 | 0.0 | Cerebral Cortex Pool | 7.0 |
| Lung ca. NCI-H522 | 0.0 | Brain (Substantia nigra) | 3.7 |
| | | Pool | |
| Liver | 0.9 | Brain (Thalamus) Pool | 8.2 |
| Fetal Liver | 43.5 | Brain (whole) | 5.4 |
| Liver ca. HepG2 | 0.0 | Spinal Cord Pool | 1.1 |
| Kidney Pool | 2.1 | Adrenal Gland | 7.9 |
| Fetal Kidney | 2.4 | Pituitary gland Pool | 0.2 |
| Renal ca. 786-0 | 0.0 | Salivary Gland | 2.1 |
| Renal ca. A498 | 0.2 | Thyroid (female) | 5.0 |
| Renal ca. ACHN | 0.0 | Pancreatic ca. CAPAN2 | 0.0 |
| Renal ca. UO-31 | 5.2 | Pancreas Pool | 9.7 |

[0816] TABLE 33
Panel 4.1D

| | Rel. Exp. (%) | Rel. Exp. (%) | Rel. Exp. (%) | | Rel. Exp. (%) | Rel. Exp. (%) | Rel. Exp. (%) |
|---|---|---|---|---|---|---|---|
| | Ag4811, Run | Ag4845, Run | Ag4944, Run | | Ag4811, Run | Ag4845, Run | Ag4944, Run |
| Tissue Name | 223273603 | 223335760 | 223598842 | Tissue Name | 223273603 | 223335760 | 223598842 |
| Secondary Th1 | 0.0 | 0.0 | 0.0 | HUVEC | 1.7 | 1.9 | 0.0 |
| act | | | | IL-1beta | | | |
| Secondary Th2 | 0.0 | 0.0 | 0.0 | HUVEC IFN | 2.3 | 0.3 | 0.0 |
| act | | | | gamma | | | |
| Secondary Tr1 | 1.5 | 0.0 | 0.0 | HUVEC TNF | 0.0 | 2.5 | 0.0 |
| act | | | | alpha + IFN | | | |
| | | | | gamma | | | |
| Secondary Th1 | 0.0 | 0.0 | 0.0 | HUVEC TNF | 0.0 | 0.0 | 0.0 |
| rest | | | | alpha + IL4 | | | |
| Secondary Th2 | 0.0 | 0.0 | 0.0 | HUVEC IL-11 | 0.0 | 1.7 | 0.0 |
| rest | | | | | | | |
| Secondary Tr1 | 0.0 | 0.0 | 0.0 | Lung | 0.0 | 0.0 | 0.0 |
| rest | | | | Microvascular | | | |
| | | | | EC none | | | |
| Primary Th1 | 0.9 | 2.0 | 0.0 | Lung | 0.0 | 0.5 | 0.0 |
| act | | | | Microvascular | | | |
| | | | | EC | | | |
| | | | | TNFalpha + | | | |
| | | | | IL-1beta | | | |
| Primary Th2 | 5.1 | 3.3 | 0.0 | Microvascular | 0.0 | 0.0 | 0.0 |
| act | | | | Dermal EC | | | |
| | | | | none | | | |
| Primary Tr1 | 2.0 | 1.1 | 0.0 | Microsvascular | 0.0 | 0.0 | 0.0 |
| act | | | | Dermal EC | | | |
| | | | | TNFalpha + | | | |
| | | | | IL-1beta | | | |
| Primary Th1 | 0.0 | 0.0 | 0.0 | Bronchial | 8.5 | 5.0 | 10.7 |
| rest | | | | epithelium | | | |
| | | | | TNFalpha + | | | |
| | | | | IL1beta | | | |
| Primary Th2 | 0.0 | 0.0 | 0.0 | Small airway | 11.1 | 5.9 | 2.7 |
| rest | | | | epithelium | | | |
| | | | | none | | | |
| Primary Tr1 rest | 0.0 | 0.0 | 0.0 | Small airway | 14.9 | 8.7 | 8.1 |
| | | | | epithelium | | | |
| | | | | TNFalpha + | | | |
| | | | | IL-1beta | | | |
| CD45RA CD4 | 0.0 | 0.5 | 0.0 | Coronery | 3.1 | 1.6 | 0.0 |
| lymphocyte act | | | | artery SMC | | | |
| | | | | rest | | | |
| CD45RO CD4 | 3.3 | 1.4 | 0.0 | Coronery | 1.4 | 0.8 | 0.0 |
| lymphocyte act | | | | artery SMC | | | |
| | | | | TNFaplha + | | | |
| | | | | IL-1beta | | | |
| CD8 | 0.7 | 0.4 | 0.0 | Astrocytes rest | 2.2 | 0.6 | 0.0 |
| lymphocyte act | | | | | | | |
| Secondary CD8 | 2.9 | 1.6 | 0.0 | Astrocytes | 0.0 | 0.5 | 0.0 |
| lymphocyte | | | | TNFalpha + | | | |
| rest | | | | IL-1beta | | | |
| Secondary CD8 | 0.7 | 0.0 | 0.0 | KU-812 | 0.0 | 0.0 | 0.0 |
| lymphocyte act | | | | (Basophil) rest | | | |
| CD4 | 0.0 | 0.0 | 0.0 | KU-812 | 0.0 | 0.6 | 0.0 |
| lymphocyte | | | | (Basophil) | | | |
| none | | | | PMA/ionomyc | | | |
| | | | | in | | | |
| 2ry | 0.0 | 0.0 | 0.0 | CCD1106 | 100.0 | 80.1 | 99.3 |
| Th1/Th2/Tr1_an | | | | (Keratinocytes) | | | |
| ti-CD95 CH11 | | | | none | | | |
| LAK cells rest | 3.9 | 2.3 | 0.0 | CCD1106 | 89.5 | 54.7 | 100.0 |
| | | | | (Keratinocytes) | | | |
| | | | | TNFalpha + | | | |
| | | | | IL-1beta | | | |
| LAK cells IL-2 | 0.0 | 0.0 | 0.0 | Liver cirrhosis | 4.6 | 3.0 | 0.0 |
| LAK cells IL-2 + | 0.0 | 1.3 | 0.0 | NCI-H292 | 2.4 | 1.3 | 5.7 |
| IL-12 | | | | none | | | |
| LAK cells IL-2 + | 1.2 | 0.8 | 0.0 | NCI-H292 IL-4 | 5.0 | 0.5 | 0.0 |
| IFN gamma | | | | | | | |
| LAK cells IL-2 + | 0.7 | 0.0 | 0.0 | NCI-H292 IL-9 | 1.9 | 2.2 | 3.1 |
| IL-18 | | | | | | | |
| LAK cells | 11.1 | 11.9 | 7.7 | NCI-H292 | 6.0 | 0.0 | 8.0 |
| PMA/ionomycin | | | | IL-13 | | | |
| NK Cells IL-2 | 0.0 | 0.0 | 0.0 | NCI-H292 | 3.9 | 2.1 | 3.2 |
| rest | | | | IFN gamma | | | |
| Two Way MLR | 0.0 | 1.8 | 0.0 | HPAEC none | 2.4 | 0.5 | 0.0 |
| 3 day | | | | | | | |
| Two Way MLR | 0.7 | 0.0 | 0.0 | HPAEC TNF | 0.0 | 1.3 | 0.0 |
| 5 day | | | | alpha + IL-1 | | | |
| | | | | beta | | | |
| Two Way MLR | 1.6 | 0.0 | 0.0 | Lung | 26.1 | 7.4 | 3.9 |
| 7 day | | | | fibroblast | | | |
| | | | | none | | | |
| PBMC rest | 0.0 | 0.0 | 0.0 | Lung | 17.1 | 11.2 | 10.2 |
| | | | | fibroblast TNF | | | |
| | | | | alpha + IL-1 | | | |
| | | | | beta | | | |
| PBMC PWM | 4.8 | 1.3 | 0.0 | Lung | 33.9 | 21.2 | 19.5 |
| | | | | fibroblast IL-4 | | | |
| PBMC PHA-L | 0.0 | 0.5 | 0.0 | Lung | 27.7 | 17.1 | 31.9 |
| | | | | fibroblast IL-9 | | | |
| Ramos (B cell) | 0.0 | 0.0 | 0.0 | Lung | 25.9 | 14.5 | 23.8 |
| none | | | | fibroblast | | | |
| | | | | IL-13 | | | |
| Ramos (B cell) | 0.0 | 0.0 | 0.0 | Lung | 52.1 | 20.7 | 33.2 |
| ionomycin | | | | fibroblast IFN | | | |
| | | | | gamma | | | |
| B lymphocytes | 10.7 | 4.3 | 10.0 | Dermal | 9.8 | 7.6 | 0.0 |
| PWM | | | | fibroblast | | | |
| | | | | CCD1070 rest | | | |
| B lymphocytes | 0.8 | 0.5 | 0.0 | Dermal | 5.4 | 5.2 | 4.5 |
| CD40L and IL-4 | | | | fibroblast | | | |
| | | | | CCD1070 | | | |
| | | | | TNF alpha | | | |
| EOL-1 dbcAMP | 0.0 | 0.0 | 0.0 | Dermal | 4.3 | 1.3 | 0.0 |
| | | | | fibroblast | | | |
| | | | | CCD1070 | | | |
| | | | | IL-1 beta | | | |
| EOL-1 dbcAMP | 2.7 | 3.1 | 0.0 | Dermal | 5.6 | 6.1 | 0.0 |
| PMA/ionomycin | | | | fibroblast IFN | | | |
| | | | | gamma | | | |
| Dendritic cells | 9.4 | 8.0 | 6.9 | Dermal | 14.9 | 4.4 | 12.2 |
| none | | | | fibroblast IL-4 | | | |
| Dendritic cells | 0.6 | 3.5 | 0.0 | Dermal | 7.5 | 6.0 | 3.8 |
| LPS | | | | Fibroblasts | | | |
| | | | | rest | | | |
| Dendritic cells | 15.5 | 12.7 | 6.2 | Neutrophils | 54.7 | 13.8 | 23.5 |
| anti-CD40 | | | | TNFa + LPS | | | |
| Monocytes rest | 0.0 | 0.0 | 0.0 | Neutrophils | 0.9 | 4.0 | 2.5 |
| | | | | rest | | | |
| Monocytes LPS | 8.8 | 4.4 | 0.0 | Colon | 0.8 | 3.7 | 0.0 |
| Macrophages | 1.6 | 0.0 | 0.0 | Lung | 4.4 | 5.3 | 0.0 |
| rest | | | | | | | |
| Macrophages | 0.0 | 0.6 | 0.0 | Thymus | 4.5 | 17.0 | 0.0 |
| LPS | | | | | | | |
| HUVEC none | 0.0 | 0.5 | 0.0 | Kidney | 29.9 | 100.0 | 15.3 |
| HUVEC starved | 0.0 | 0.5 | 0.0 | | | | |

[0817] General_screening_panel_v1.4 Summary/General_screening_panel_v1.5

[0818] Summary: Ag4811/Ag4845 Two experiments with the same probe and primer set show highest expression of the NOV7 gene in a gastric cancer cell line (NCI-N87) (CT=29.2). In addition, there appears to be substantial expression associated with other gastric cancer cell lines, colon cancer cell lines, breast cancer cell lines, ovarian cancer cell lines and a renal cancer cell line. Thus, the expression of this gene could be used to distinguish these samples from other samples in the panel. Moreover, therapeutic modulation of this gene, through the use of small molecule drugs, antibodies or protein therapeutics might be of benefit in the treatment of gastric cancer, colon cancer, breast cancer, ovarian cancer or renal cancer.

[0819] This gene is also moderately expressed in a number of metabolic tissues including adipose, fetal liver, skeletal muscle, adrenal, thyroid and pancreas. Thus, this gene product may be important for the pathogenesis, diagnosis, and/or treatment of metabolic diseases, including obesity and Types 1 and 2 diabetes.

[0820] This gene encodes a protein with homology to an interleukin 1 receptor-like protein. Interleukins are involved in many brain pathologies, due to the proinflammatory action of interleukins. Inflammation is a key pathological process mediating the damage due to stroke, Alzheimer's disease, and spinocerebellar ataxias, among others. IL-1 receptor like protein has been shown to bind IL-18, which is involved in CNS inflammation. Moreover, anti-inflammatory agents that are associated with reduced risk of Alzheimer's disease, such as NSAIDS, have been shown to inhibit IL-18 expression. Therefore, this gene product, which is expressed in the brain, is an ideal target for pharmacological interference with the inflammatory processes underlying these CNS disorders and any other CNS disorder in which inflammation plays a role.

[0821] References:

[0822] Evert B O, Vogt I R, Kindermann C, Ozimek L, de Vos R A, Brunt E R, Schmitt I, Klockgether T, Wullner U. Inflammatory genes are upregulated in expanded ataxin-3-expressing cell lines and spinocerebellar ataxia type 3 brains. J Neurosci Aug. 1, 2001;21(15):5389-96

[0823] Spinocerebellar ataxia type 3 (SCA3) is a polyglutamine disorder caused by a CAG repeat expansion in the coding region of a gene encoding ataxin-3. To study putative alterations of gene expression induced by expanded ataxin-3, we performed PCR-based cDNA subtractive hybridization in a cell culture model of SCA3. In rat mesencephalic CSM14.1 cells stably expressing expanded ataxin-3, we found a significant upregulation of mRNAs encoding the endopeptidase matrix metalloproteinase 2 (MMP-2), the transmembrane protein amyloid precursor protein, the interleukin-1 receptor-related Fos-inducible transcript, and the cytokine stromal cell-derived factor 1 alpha (SDF1alpha). Immunohistochemical, studies of the corresponding or associated proteins in human SCA3 brain tissue confirmed these findings, showing increased expression of MMP-2 and amyloid beta-protein (Abeta) in pontine neurons containing nuclear inclusions. In addition, extracellular Abeta-immunoreactive deposits were detected in human SCA3 pons. Furthermore, pontine neurons of SCA3 brains strongly expressed the _ignaling_mmatory interleukin-1 receptor antagonist, the proinflammatory cytokine interleukin-1beta, and the proinflammatory chemokine SDF1. Finally, increased numbers of reactive astrocytes and activated microglial cells were found in SCA3 pons. These results suggest that inflammatory processes are involved in the pathogenesis of SCA3.

[0824] Hoshino K, Tsutsui H, Kawai T, Takeda K, Nakanishi K, Takeda Y, Akira S. Cutting edge: generation of IL-18 receptor-deficient mice: evidence for IL-1 receptor-related protein as an essential IL-18 binding receptor. J Immunol May 1, 1999;162(9):5041-4

[0825] IL-18 is a proinflammatory cytokine that plays an important role in NK cell activation and Th1cell response. Recently IL-1R-related protein (IL-1Rrp) has been cloned as the receptor for IL-18. However, the functional role of IL-1Rrp is still controversial due to its low affinity to IL-18 as well as the possibility of the presence of another high-affinity binding receptor. In the present study, we have generated and characterized IL-1Rrp-deficient mice. The binding of murine rIL-18 was not detected in Th1-developing splenic CD4+ T cells isolated from IL-1Rrp-deficient mice. The activation of NF-kappa B or c-Jun N-terminal kinase were also not observed in the Th1cells. NK cells from IL-1Rrp-deficient mice had defects in cytolytic activity and IFN-gamma production in response to IL-18. Th1 cell development was also impaired in IL-1Rrp-deficient mice. These data demonstrate that IL-1Rrp is a ligand-binding receptor that is essential for IL-18-mediated signaling events.

[0826] Fiorucci S, Antonelli E, Burgaud J L, Morelli A. Nitric oxide-releasing NSAIDs: a review of their current status. Drug Saf2001;24(11):801-11

[0827] Nonsteroidal anti-inflammatory drugs (NSAIDs) are among the most widely prescribed drugs worldwide owing to their anti-inflammatory, antipyretic and analgesic properties. However, their use is hampered by gastrointestinal (GI) toxicity, the most common drug-related serious adverse event in_ignaling_mmat nations. Nitric oxide (NO)-releasing NSAIDs, a recently described class of drugs, are generated by adding a nitroxybutyl or a nitrosothiol moiety to the parent NSAID via a short-chain ester linkage. While efficacy of nitrosothiol-NO-NSAIDs still awaits investigation, nitroxybutyl-NO-NSAIDs have been extensively studied in animals, thus the abbreviation NO-NSAIDs used here refers to the latter group of NSAID derivatives. NO-NSAIDs retain the anti-inflammatory and antipyretic activity of original NSAIDs, although they exhibit markedly reduced gastrointestinal toxicity. NO-NSAIDs are nonselective cyclo-oxygenase (COX) inhibitors, and they also exert COX-independent activities that are NO-dependent. Indeed, NO-NSAIDs suppress production of the cytokines interleukin (IL)-1beta, IL-18 and interferon-gamma by causing the S-nitrosilation/inhibition of caspase-1. In acute and chronic animal models of inflammation, it has been demonstrated that NO-NSAIDs abrogated prostaglandin E2 as well as thromboxane B2 generation. In a murine model, NO-naproxen was approximately 10-fold more potent than naproxen in reducing animal writhing after intraperitoneal injection of acetic acid. Similar data have been obtained in chronic models of pain such as rat adjuvant arthritis. In vivo and in vitro studies suggest that NO-aspirin (acetylsalicylic acid) exerts more potent antithrombotic action than aspirin, probably by coupling the ability to inhibit COX-1 with the anti-adhesive effect of NO. Moreover, in a model of renal injury NO-flurbiprofen not only has been demonstrated to be devoid of nephrotoxicity but also to ameliorate renal function. Finally, in an animal model of chronic neurodegenerative disease, NO-flurbiprofen and NO-aspirin attenuated the brain inflammatory response. The GI toxicity of NO-flurbiprofen and NO-naproxen is currently being investigated in healthy individuals.

[0828] Stoll G, Jander S, Schroeter M. Cytokines in CNS disorders: neurotoxicity versus neuroprotection. J Neural Transm Suppl 2000;59:81-9

[0829] Cytokines orchestrate T cell-mediated immune responses. In experimental autoimmune encephalomyelitis (EAE) the proinflammatory cytokines interferon (WN)-gamma, tumor necrosis factor (TNF)-alpha, interleukin (IL)-1beta, IL-6, IL-12 and IL-18 are critically involved in the initiation and amplification of the local immune response in the CNS which is counter-balanced by upregulation of antiinflammatory cytokines such as IL-10. The predicted function of individual cytokines during EAE has recently been challenged by transgenic animal studies and neutralization experiments. Cytokine induction is not restricted to autoimmunity in the nervous system. Cytokines are involved in nerve regeneration and induced in focal cerebral ischemia both at the site of infarction and in remote nonischemic brain regions. In cerebral ischemia TNF-alpha and IL-1beta probably have dual functions: In concert with upregulation of inducible NO synthase (iNOS) they exert neurotoxicity while in the absence of iNOS, TNF-alpha and IL-1 beta may contribute to neuroprotection and plasticity. The interplay between glial cells, infiltrating leukocytes and induced cytokines leading to CNS pathology is complex and incompletely understood. Further assessment of the functional contribution of cytokines critically depends on the elucidation of downstream secondary signaling mechanisms.

[0830] Masada T, Hua Y, Xi G, Yang G Y, Hoff J T, Keep R F. Attenuation of intracerebral hemorrhage and thrombin-induced brain edema by overexpression of interleukin-1 receptor antagonist. J Neurosurg October 2001;95(4):680-6

[0831] OBJECT: Adenovirus-mediated overexpression of interleukin-1 receptor antagonist (IL-1ra) attenuates the inflammatory reaction and brain injury that follows focal cerebral ischemia. Recently, an inflammatory reaction after intracerebral hemorrhage (ICH) was identified. In this study the authors examine the hypothesis that overexpression of IL-1ra reduces brain injury (specifically edema formation) after ICH. METHODS: Adenoviruses expressing IL-1ra (Ad.RSVIL-1ra) or LacZ, a control protein (Ad.RSVlacZ), or saline were injected into the left lateral cerebral ventricle in rats. On the 5^{th} day after virus injection, 100 microl of autologous blood or 5 U thrombin was infused into the right basal ganglia. Rats with ICH were killed 24 or 72 hours later for measurement of brain water and ion content. Thrombin-treated rats were killed 24 hours later for edema measurements and an assessment of polymorphonuclear leukocyte (PMNL) infiltration by myeloperoxidase (MPO) assay, as well as histological evaluation. Compared with saline-treated and Ad.RSVlacZ-transduced controls, Ad.RSVIL-1ra-transduced rats had significantly attenuated edema in the ipsilateral basal ganglia 3 days after ICH (81.5+/−0.3% compared with 83.4+/−0.4% and 83.3+/−0.5% in control animals). Thrombin-induced brain edema was also reduced in Ad.RSVIL-1ra-treated rats (81.3+/−0.4% compared with 83.2+/−0.4% and 82.5+/−0.4% in control rats). The reduction in thrombin-induced edema was associated with a reduction in PMNL infiltration into the basal ganglia, as assessed by MPO assay (49% reduction) and histological examination. CONCLUSIONS: Overexpression of IL-1ra by using an adenovirus vector attenuated brain edema formation and thrombin-induced intracerebral inflammation following ICH. The reduction in ICH-induced edema with IL-1ra may result from reduction of thrombin-induced brain inflammation.

[0832] Panel 4.1D Summary: Ag 4811/4845/4944 Three experiments with two-different probes and primers show high expression of the NOV7 transcript in keratinocytes, regardless of their treatment with TNF-a plus IL-1b. It is also found to a lesser extent in neutrophils and lung fibroblasts. This transcript encodes for a novel IL-1 receptor related protein that may have the potential to trigger novel members of the IL-1 family members as described by Debets and al. (Ref 1 and 2). Novel IL1 receptor like molecules have been cloned and reported to lead to activation of NF-kB and IL18 production, a potent inflammatory cytokine associated with lung inflammation, IBD and psoriasis. IL1 R family members have also been shown to mediate inflammatory signals through NF-KB activation, among other ignaling pathways. Therefore, modulation of the function of this receptor by the use of protein therapeutics or antibodies could potentially prevent or reduce the severity of inflammatory processes observed in inflammatory lung and skin diseases such as asthma, bronchitis, emphysema and psoriasis.

[0833] References:

[0834] Debets R, Timans J C, Homey B, Zurawski S, Sana T R, Lo S, Wagner J, Edwards G, Clifford T, Menon S, Bazan J F, Kastelein R A. Two novel IL-1 family members, IL-1 delta and IL-1 epsilon, function as an antagonist and agonist of NF-kappa B activation through the orphan IL-1 receptor-related protein 2 J Immunol Aug. 1, 2001;167(3):1440-6

[0835] IL-1 is of utmost importance in the host response to immunological challenges. We identified and functionally characterized two novel IL-1 ligands termed IL-1delta and IL-1epsilon. Northern blot analyses show that these IL-1s are highly abundant in embryonic tissue and tissues containing epithelial cells (i.e., skin, lung, and stomach). In extension, quantitative real-time PCR revealed that of human skin-derived cells, only keratinocytes but not fibroblasts, endothelial cells, or melanocytes express IL-1delta and epsilon. Levels of keratinocyte IL-1delta are approximately 10-fold higher than those of IL-1epsilon. In vitro stimulation of keratinocytes with IL-1beta/TNF-alpha significantly up-regulates the expression of IL-1epsilon mRNA, and to a lesser extent of IL-1delta mRNA. In NF-kappaB-luciferase reporter assays, we demonstrated that IL-1delta and epsilon proteins do not initiate a functional response via classical IL-1R pairs, which confer responsiveness to IL-1alpha and beta or IL-18. However, IL-1epsilon activates NF-kappaB through the orphan IL-1R-related protein 2 (IL-1Rrp2), whereas IL-1delta, which shows striking homology to IL-1receptor antagonist, specifically and potently inhibits this IL-1epsilon response. In lesional psoriasis skin, characterized by chronic cutaneous inflammation, the mRNA expression of both IL-1 ligands as well as IL-1Rrp2 are increased relative to normal healthy skin. In total, IL-1delta and epsilon and IL-1Rrp2 may constitute an independent signaling system, analogous to IL-1alphabeta/receptor agonist and IL-1R1, that is present in epithelial barriers of our body and takes part in local inflammatory responses.

[0836] Parnet P, Garka K E, Bonnert T P, Dower S K, Sims J E. IL-1Rrp is a novel receptor.like molecule similar to the type I interleukin-1 receptor and its homologues T1/ST2 and IL-1R AcP. :2-J Biol Chem Feb. 23, 1996;271(8):3967-70

[0837] A novel member of the interleukin-1 receptor family has been cloned by polymerase chain reaction using degenerate oligonucleotide primers derived from regions of sequence conservation, using as template a yeast artificial chromosome known to contain both interleukin-1 (IL-1) receptors and T1/ST2. The new receptor, called IL-1 receptor-related protein or IL-1Rrp, fails to bind any of the known IL-1 ligands. A chimeric receptor, in which the IL-1Rrp cytoplasmic domain is fused to the extracellular and transmembrane regions of the IL-1 receptor, responds to IL-1 following transfection into COS cells by activation of NFkappaB and induction of IL-8 promoter function.

[0838] NOV6b and NOV6c

[0839] Expression of gene NOV6b and variant NOV6c was assessed using the primer-probe sets Ag4811, Ag4845 and Ag4946, described in Tables 34, 35 and 36. Results of the RTQ-PCR runs are shown in Tables 37, 38 and 39.

TABLE 34

Probe Name Ag4811

| | | | | |
|---|---|---|---|---|
| Primers | Sequences | Length | Start Positon | SEQ ID NO: |

| | | | | |
|---|---|---|---|---|
| Forward | 5′-catgtctcttttcgggaacata-3′ | 22 | 848 | 184 |
| Probe | TET-5′-cacagtaaacatcaccttcttggaagtg-3′-TAMRA | 28 | 877 | 185 |
| Reverse | 5′gaaggccataatcttccatttt-3′ | 22 | 905 | 186 |

[0840] TABLE 35

Probe Name Ag4845

| | | | | |
|---|---|---|---|---|
| Primers | Sequences | Length | Start Positon | SEQ ID NO: |

| | | | | |
|---|---|---|---|---|
| Forward | 5′-catgtctcttttcgggaacata-3′ | 22 | 848 | 187 |
| Probe | TET-5′-cacagtaaacatcaccttcttggaagtg-3′-TAMRA | 28 | 877 | 188 |
| Reverse | 5′gaaggccataatcttccatttt-3′ | 22 | 905 | 189 |

[0841] TABLE 36

Probe Name Ag4946

| | | | | |
|---|---|---|---|---|
| Primers | Sequences | Length | Start Positon | SEQ ID NO: |

| | | | | |
|---|---|---|---|---|
| Forward | 5′-ggcatcactgtgagcattagta-3′ | 22 | 695 | 190 |
| Probe | TET-5′-ctctgattgtggactgcaatgtaacagac-3′-TAMRA | 29 | 720 | 191 |
| Reverse | 5′tgactctccagcatcgtaga-3′ | 20 | 766 | 192 |

[0842] TABLE 37
General_screening_panel_v1.4

| | Rel. Exp. (%) Ag4811, | | Rel. Exp. (%) Ag4811, |
|---|---|---|---|
| Tissue Name | Run 223204488 | Tissue Name | Run 223204488 |
| Adipose | 4.9 | Renal ca. TK-10 | 71.7 |
| Melanoma* | 1.4 | Bladder | 6.5 |
| Hs688(A).T | | | |
| Melanoma* | 2.9 | Gastric ca. (liver met.) | 100.0 |
| Hs688(B).T | | NCI-N87 | |
| Melanoma* M14 | 0.0 | Gastric ca. KATO III | 24.1 |
| Melanoma* | 0.0 | Colon ca. SW-948 | 2.4 |
| LOXIMVI | | | |
| Melanoma* SK- | 0.0 | Colon ca. SW480 | 7.1 |
| MEL-5 | | | |
| Squamous cell | 45.4 | Colon ca.* (SW480 | 0.5 |
| carcinoma SCC-4 | | met) SW620 | |
| Testis Pool | 1.7 | Colon ca. HT29 | 16.8 |
| Prostate ca.* (bone | 0.0 | Colon ca. HCT-116 | 0.0 |
| met) PC-3 | | | |
| Prostate Pool | 2.7 | Colon ca. CaCo-2 | 0.5 |
| Placenta | 0.5 | Colon cancer tissue | 12.1 |
| Uterus Pool | 0.4 | Colon ca. SW1116 | 6.9 |
| Ovarian ca. | 1.4 | Colon ca. Colo-205 | 3.7 |
| OVCAR-3 | | | |
| Ovarian ca. SK-OV-3 | 0.3 | Colon ca. SW-48 | 0.0 |
| Ovarian ca. | 45.1 | Colon Pool | 1.6 |
| OVCAR-4 | | | |
| Ovarian ca. | 0.0 | Small Intestine Pool | 1.2 |
| OVCAR-5 | | | |
| Ovarian ca. IGROV-1 | 0.4 | Stomach Pool | 7.0 |
| Ovarian ca. | 25.9 | Bone Marrow Pool | 3.1 |
| OVCAR-8 | | | |
| Ovary | 6.0 | Fetal Heart | 0.4 |
| Breast ca. MCF-7 | 0.0 | Heart Pool | 1.3 |
| Breast ca. MDA- | 32.1 | Lymph Node Pool | 2.8 |
| MB-231 | | | |
| Breast ca. BT 549 | 10.9 | Fetal Skeletal Muscle | 0.6 |
| Breast ca. T47D | 1.2 | Skeletal Muscle Pool | 3.0 |
| Breast ca. MDA-N | 0.0 | Spleen Pool | 4.2 |
| Breast Pool | 6.3 | Thymus Pool | 3.8 |
| Trachea | 8.1 | CNS cancer (glio/astro) | 0.2 |
| | | U87-MG | |
| Lung | 0.1 | CNS cancer (glio/astro) | 0.8 |
| | | U-118-MG | |
| Fetal Lung | 5.3 | CNS cancer | 0.3 |
| | | (neuro; met) SK-N-AS | |
| Lung ca. NCI-N417 | 0.0 | CNS cancer (astro) SF- | 0.4 |
| | | 539 | |
| Lung ca. LX-1 | 3.9 | CNS cancer (astro) | 4.9 |
| | | SNB-75 | |
| Lung ca. NCI-H146 | 0.0 | CNS cancer (glio) | 0.0 |
| | | SNB-19 | |
| Lung ca. SHP-77 | 0.0 | CNS cancer (glio) SF- | 0.0 |
| | | 295 | |
| Lung ca. A549 | 0.1 | Brain (Amygdala) Pool | 4.6 |
| Lung ca. NCI-H526 | 0.0 | Brain (cerebellum) | 0.4 |
| Lung ca. NCI-H23 | 3.8 | Brain (fetal) | 4.7 |
| Lung ca. NCI-H460 | 0.0 | Brain (Hippocampus) | 3.0 |
| | | Pool | |
| Lung ca. HOP-62 | 0.1 | Cerebral Cortex Pool | 6.9 |
| Lung ca. NCI-H522 | 0.0 | Brain (Substantia nigra) | 4.9 |
| | | Pool | |
| Liver | 1.2 | Brain (Thalamus) Pool | 9.2 |
| Fetal Liver | 4.3 | Brain (whole) | 7.0 |
| Liver ca. HepG2 | 0.0 | Spinal Cord Pool | 0.8 |
| Kidney Pool | 3.2 | Adrenal Gland | 12.5 |
| Fetal Kidney | 5.1 | Pituitary gland Pool | 0.1 |
| Renal ca. 786-0 | 0.0 | Salivary Gland | 2.8 |
| Renal ca. A498 | 0.0 | Thyroid (female) | 6.3 |
| Renal ca. ACHN | 0.0 | Pancreatic ca. CAPAN2 | 0.0 |
| Renal ca. UO-31 | 5.3 | Pancreas Pool | 21.0 |

[0843] TABLE 38
General_screening_panel_v1.5

| | Rel. Exp. (%) Ag4845, | | Rel. Exp. (%) Ag4845, |
|---|---|---|---|
| Tissue Name | Run 228796340 | Tissue Name | Run 228796340 |
| Adipose | 5.8 | Renal ca. TK-10 | 59.0 |
| Melanoma* | 1.9 | Bladder | 5.5 |
| Hs688(A).T | | | |
| Melanoma* | 1.8 | Gastric ca. (liver met.) | 100.0 |
| Hs688(B).T | | NCI-N87 | |
| Melanoma* M14 | 0.0 | Gastric ca. KATO III | 16.3 |
| Melanoma* | 0.0 | Colon ca. SW-948 | 1.1 |
| LOXIMVI | | | |
| Melanoma* SK- | 0.0 | Colon ca. SW480 | 5.1 |
| MEL-5 | | | |
| Squamous cell | 34.9 | Colon ca.* (SW480 | 0.0 |
| carcinoma SCC-4 | | met) SW620 | |
| Testis Pool | 0.9 | Colon ca. HT29 | 16.7 |
| Prostate ca.* (bone | 0.0 | Colon ca. HCT-116 | 0.0 |
| met) PC-3 | | | |
| Prostate Pool | 1.2 | Colon ca. CaCo-2 | 0.0 |
| Placenta | 0.5 | Colon cancer tissue | 9.2 |
| Uterus Pool | 0.4 | Colon ca. SW1116 | 6.0 |
| Ovarian ca. | 0.6 | Colon ca. Colo-205 | 3.6 |
| OVCAR-3 | | | |
| Ovarian ca. SK-OV-3 | 0.3 | Colon ca. SW-48 | 0.0 |
| Ovarian ca. | 36.3 | Colon Pool | 2.9 |
| OVCAR-4 | | | |
| Ovarian ca. | 0.1 | Small Intestine Pool | 0.8 |
| OVCAR-5 | | | |
| Ovarian ca. IGROV-1 | 0.7 | Stomach Pool | 4.6 |
| Ovarian ca. | 20.2 | Bone Marrow Pool | 1.7 |
| OVCAR-8 | | | |
| Ovary | 3.5 | Fetal Heart | 1.0 |
| Breast ca. MCF-7 | 0.0 | Heart Pool | 1.0 |
| Breast ca. MDA- | 18.2 | Lymph Node Pool | 2.1 |
| MB-231 | | | |
| Breast ca. BT 549 | 6.2 | Fetal Skeletal Muscle | 0.7 |
| Breast ca. T47D | 0.7 | Skeletal Muscle Pool | 3.0 |
| Breast ca. MDA-N | 0.0 | Spleen Pool | 2.6 |
| Breast Pool | 4.6 | Thymus Pool | 3.4 |
| Trachea | 4.5 | CNS cancer (glio/astro) | 0.3 |
| | | U87-MG | |
| Lung | 0.2 | CNS cancer (glio/astro) | 0.9 |
| | | U-118-MG | |
| Fetal Lung | 4.1 | CNS cancer | 0.2 |
| | | (neuro; met) SK-N-AS | |
| Lung ca. NCI-N417 | 0.0 | CNS cancer (astro) SF- | 0.0 |
| | | 539 | |
| Lung ca. LX-1 | 3.1 | CNS cancer (astro) | 3.0 |
| | | SNB-75 | |
| Lung ca. NCI-H146 | 0.0 | CNS cancer (glio) | 0.0 |
| | | SNB-19 | |
| Lung ca. SHP-77 | 0.0 | CNS cancer (glio) SF- | 0.0 |
| | | 295 | |
| Lung ca. A549 | 0.2 | Brain (Amygdala) Pool | 1.3 |
| Lung ca. NCI-H526 | 0.1 | Brain (cerebellum) | 1.6 |
| Lung ca. NCI-H23 | 3.6 | Brain (fetal) | 2.8 |
| Lung ca. NCI-H460 | 0.0 | Brain (Hippocampus) | 2.0 |
| | | Pool | |
| Lung ca. HOP-62 | 0.0 | Cerebral Cortex Pool | 7.0 |
| Lung ca. NCI-H522 | 0.0 | Brain (Substantia nigra) | 3.7 |
| | | Pool | |
| Liver | 0.9 | Brain (Thalamus) Pool | 8.2 |
| Fetal Liver | 43.5 | Brain (whole) | 5.4 |
| Liver ca. HepG2 | 0.0 | Spinal Cord Pool | 1.1 |
| Kidney Pool | 2.1 | Adrenal Gland | 7.9 |
| Fetal Kidney | 2.4 | Pituitary gland Pool | 0.2 |
| Renal ca. 786-0 | 0.0 | Salivary Gland | 2.1 |
| Renal ca. A498 | 0.2 | Thyroid (female) | 5.0 |
| Renal ca. ACHN | 0.0 | Pancreatic ca. CAPAN2 | 0.0 |
| Renal ca. UO-31 | 5.2 | Pancreas Pool | 9.7 |

[0844] TABLE 39
Panel 4.1D

| | Rel. Exp. (%) | Rel. Exp. (%) | Rel. Exp. (%) | | Rel. Exp. (%) | Rel. Exp. (%) | Rel. Exp. (%) |
|---|---|---|---|---|---|---|---|
| | Ag4811, Run | Ag4845, Run | Ag4946, Run | | Ag4811, Run | Ag4845, Run | Ag4946, Run |
| Tissue Name | 223273603 | 223335760 | 223626614 | Tissue Name | 223273603 | 223335760 | 223626614 |
| Secondary Th1 | 0.0 | 0.0 | 0.0 | HUVEC | 1.7 | 1.9 | 0.0 |
| act | | | | IL-1beta | | | |
| Secondary Th2 | 0.0 | 0.0 | 0.0 | HUVEC IFN | 2.3 | 0.3 | 0.0 |
| act | | | | gamma | | | |
| Secondary Tr1 | 1.5 | 0.0 | 0.0 | HUVEC TNF | 0.0 | 2.5 | 0.0 |
| act | | | | alpha + IFN | | | |
| | | | | gamma | | | |
| Secondary Th1 | 0.0 | 0.0 | 0.0 | HUVEC TNF | 0.0 | 0.0 | 0.0 |
| rest | | | | alpha + IL4 | | | |
| Secondary Th2 | 0.0 | 0.0 | 0.0 | HUVEC IL-11 | 0.0 | 1.7 | 0.0 |
| rest | | | | | | | |
| Secondary Tr1 | 0.0 | 0.0 | 0.0 | Lung | 0.0 | 0.0 | 0.0 |
| rest | | | | Microvascular | | | |
| | | | | EC none | | | |
| Primary Th1 act | 0.9 | 2.0 | 0.0 | Lung | 0.0 | 0.5 | 0.0 |
| | | | | Microvascular | | | |
| | | | | EC | | | |
| | | | | TNFalpha + | | | |
| | | | | IL-1beta | | | |
| Primary Th2 act | 5.1 | 3.3 | 0.0 | Microvascular | 0.0 | 0.0 | 0.0 |
| | | | | Dermal EC | | | |
| | | | | none | | | |
| Primary Tr1 act | 2.0 | 1.1 | 0.0 | Microsvasular | 0.0 | 0.0 | 0.0 |
| | | | | Dermal EC | | | |
| | | | | TNFalpha + | | | |
| | | | | IL-1beta | | | |
| Primary Th1 | 0.0 | 0.0 | 0.0 | Bronchial | 8.5 | 5.0 | 12.9 |
| rest | | | | epithelium | | | |
| | | | | TNFalpha + | | | |
| | | | | IL1beta | | | |
| Primary Th2 | 0.0 | 0.0 | 0.0 | Small airway | 11.1 | 5.9 | 8.6 |
| rest | | | | epithelium | | | |
| | | | | none | | | |
| Primary Tr1 rest | 0.0 | 0.0 | 0.0 | Small airway | 14.9 | 8.7 | 2.9 |
| | | | | epithelium | | | |
| | | | | TNFalpha + | | | |
| | | | | IL-1beta | | | |
| CD45RA CD4 | 0.0 | 0.5 | 0.0 | Coronery | 3.1 | 1.6 | 7.3 |
| lymphocyte act | | | | artery SMC | | | |
| | | | | rest | | | |
| CD45RO CD4 | 3.3 | 1.4 | 13.5 | Coronery | 1.4 | 0.8 | 0.0 |
| lymphocyte act | | | | artery SMC | | | |
| | | | | TNFalpha + | | | |
| | | | | IL-1beta | | | |
| CD8 | 0.7 | 0.4 | 0.0 | Astrocytes rest | 2.2 | 0.6 | 0.0 |
| lymphocyte act | | | | | | | |
| Secondary CD8 | 2.9 | 1.6 | 0.0 | Astrocytes | 0.0 | 0.5 | 0.0 |
| lymphocyte rest | | | | TNFalpha + | | | |
| | | | | IL-1beta | | | |
| Secondary CD8 | 0.7 | 0.0 | 0.0 | KU-812 | 0.0 | 0.0 | 0.0 |
| lymphocyte act | | | | (Basophil) rest | | | |
| CD4 | 0.0 | 0.0 | 0.0 | KU-812 | 0.0 | 0.6 | 0.0 |
| lymphocyte | | | | (Basophil) | | | |
| none | | | | PMA/ionomyc | | | |
| | | | | in | | | |
| 2ry | 0.0 | 0.0 | 0.0 | CCD1106 | 100.0 | 80.1 | 57.8 |
| Th1/Th2/Tr1_an | | | | (Keratinocytes) | | | |
| ti-CD95 CH11 | | | | none | | | |
| LAK cells rest | 3.9 | 2.3 | 6.8 | CCD1106 | 89.5 | 54.7 | 100.0 |
| | | | | (Keratinocytes) | | | |
| | | | | TNFalpha + | | | |
| | | | | IL-1beta | | | |
| LAK cells IL-2 | 0.0 | 0.0 | 0.0 | Liver cirrhosis | 4.6 | 3.0 | 5.4 |
| LAK cells IL-2 + | 0.0 | 1.3 | 0.0 | NCI-H292 | 2.4 | 1.3 | 5.2 |
| IL-12 | | | | none | | | |
| LAK cells IL-2 | 1.2 | 0.8 | 0.0 | NCI-H292 IL-4 | 5.0 | 0.5 | 14.5 |
| IFN gamma | | | | | | | |
| LAK cells IL-2 + | 0.7 | 0.0 | 0.0 | NCI-H292 IL-9 | 1.9 | 2.2 | 15.6 |
| IL-18 | | | | | | | |
| LAK cells | 11.1 | 11.9 | 35.8 | NCI-H292 | 6.0 | 0.0 | 0.0 |
| PMA/ionomycin | | | | IL-13 | | | |
| NK Cells IL-2 | 0.0 | 0.0 | 0.0 | NCI-H292 | 3.9 | 2.1 | 15.4 |
| rest | | | | IFN gamma | | | |
| Two Way MLR | 0.0 | 1.8 | 0.0 | HPAEC none | 2.4 | 0.5 | 0.0 |
| 3 day | | | | | | | |
| Two Way MLR | 0.7 | 0.0 | 0.0 | HPAEC TNF | 0.0 | 1.3 | 0.0 |
| 5 day | | | | alpha + IL-1 | | | |
| | | | | beta | | | |
| Two Way MLR | 1.6 | 0.0 | 0.0 | Lung | 26.1 | 7.4 | 10.2 |
| 7 day | | | | fibroblast | | | |
| | | | | none | | | |
| PBMC rest | 0.0 | 0.0 | 0.0 | Lung | 17.1 | 11.2 | 48.6 |
| | | | | fibroblast TNF | | | |
| | | | | alpha + IL-1 | | | |
| | | | | beta | | | |
| PBMC PWM | 4.8 | 1.3 | 0.0 | Lung | 33.9 | 21.2 | 60.3 |
| | | | | fibroblast IL-4 | | | |
| PBMC PHA-L | 0.0 | 3.5 | 0.0 | Lung | 27.7 | 17.1 | 19.6 |
| | | | | fibroblast IL-9 | | | |
| Ramos (B cell) | 0.0 | 0.0 | 0.0 | Lung | 25.9 | 14.5 | 74.2 |
| none | | | | fibroblast | | | |
| | | | | IL-13 | | | |
| Ramos (B cell) | 0.0 | 0.0 | 0.0 | Lung | 52.1 | 20.7 | 28.9 |
| ionomycin | | | | fibroblast IFN | | | |
| | | | | gamma | | | |
| B lymphocytes | 10.7 | 4.3 | 6.7 | Dermal | 9.8 | 7.6 | 9.9 |
| PWM | | | | fibroblast | | | |
| | | | | CCD1070 rest | | | |
| B lymphocytes | 0.8 | 0.5 | 0.0 | Dermal | 5.4 | 5.2 | 0.0 |
| CD40L and IL-4 | | | | fibroblast | | | |
| | | | | CCD1070 | | | |
| | | | | TNF alpha | | | |
| EOL-1 dbcAMP | 0.0 | 0.0 | 0.0 | Dermal | 4.3 | 1.3 | 11.7 |
| | | | | fibroblast | | | |
| | | | | CCD1070 | | | |
| | | | | IL-1 beta | | | |
| EOL-1 dbcAMP | 2.7 | 3.1 | 0.0 | Dermal | 5.6 | 6.1 | 8.3 |
| PMA/ionomycin | | | | fibroblast IFN | | | |
| | | | | gamma | | | |
| Dendritic cells | 9.4 | 8.0 | 0.0 | Dermal | 14.9 | 4.4 | 12.8 |
| none | | | | fibroblast IL-4 | | | |
| Dendritic cells | 0.6 | 3.5 | 15.2 | Dermal | 7.5 | 6.0 | 0.0 |
| LPS | | | | Fibroblasts | | | |
| | | | | rest | | | |
| Dendritic cells | 15.5 | 12.7 | 25.9 | Neutrophils | 54.7 | 13.8 | 43.2 |
| anti-CD40 | | | | TNFa+ LPS | | | |
| Monocytes rest | 0.0 | 0.0 | 0.0 | Neutrophils | 0.9 | 4.0 | 0.0 |
| | | | | rest | | | |
| Monocytes LPS | 8.8 | 4.4 | 0.0 | Colon | 0.8 | 3.7 | 0.0 |
| Macrophages | 1.6 | 0.0 | 0.0 | Lung | 4.4 | 5.3 | 0.0 |
| rest | | | | | | | |
| Macrophages | 0.0 | 0.6 | 0.0 | Thymus | 4.5 | 17.0 | 16.6 |
| LPS | | | | | | | |
| HUVEC none | 0.0 | 0.5 | 0.0 | Kidney | 29.9 | 100.0 | 8.9 |
| HUVEC starved | 0.0 | 0.5 | 0.0 | | | | |

[0845] General_screening_panel_v1.4 Summary/General_screening_panel_v1.5

[0846] Summary: Ag4811/Ag4845 Two experiments with the same probe and primer set show highest expression of the NOV7 gene appears to be highest in a sample derived from a gastric cancer cell line (NCI-N87)(CT=29.2). In addition there appears to be substantial expression associated with other gastric cancer cell lines, colon cancer cell lines, breast cancer cell lines, ovarian cancer cell lines and a renal cancer cell line. Thus, the expression of this gene could be used to distinguish these samples from other samples in the panel. Moreover, therapeutic modulation of this gene, through the use of small molecule drugs, antibodies or protein therapeutics might be of benefit in the treatment of gastric cancer, colon cancer, breast cancer, ovarian cancer or renal cancer.

[0847] This gene is also moderately expressed in a number of metabolic tissues including adipose, fetal liver, skeletal muscle, adrenal, thyroid and pancreas. Thus, this gene product may be important for the pathogenesis, diagnosis, and/or treatment of metabolic diseases, including obesity and Types 1 and 2 diabetes.

[0848] This gene encodes a protein with homology to an interleukin 1 receptor-like protein. Interleukins are involved in many brain pathologies, due to the proinflammatory action of interleukins. Inflammation is a key pathological process mediating the damage due to stroke, Alzheimer's disease, and spinocerebellar ataxias, among others. IL-1 receptor like protein has been shown to bind IL-18, which is involved in CNS inflammation. Moreover, anti-inflammatory agents that are associated with reduced risk of Alzheimer's disease, such as NSAIDS, have been shown to inhibit IL-18 expression. Therefore, this gene product, which is expressed in the brain, is an ideal target for pharmacological interference with the inflammatory processes underlying these CNS disorders and any other CNS disorder in which inflammation plays a role.

[0849] References:

[0850] Evert B O, Vogt I R, Kindermann C, Ozimek L, de Vos R A, Brunt E R, Schmitt I, Klockgether T, Wullner U. Inflammatory genes are upregulated in expanded ataxin-3-expressing cell lines and spinocerebellar ataxia type 3 brains. J Neurosci Aug. 1, 2001;21(15):5389-96

[0851] Spinocerebellar ataxia type 3 (SCA3) is a polyglutamine disorder caused by a CAG repeat expansion in the coding region of a gene encoding ataxin-3. To study putative alterations of gene expression induced by expanded ataxin-3, we performed PCR-based cDNA subtractive hybridization in a cell culture model of SCA3. In rat mesencephalic CSM14.1 cells stably expressing expanded ataxin-3, we found a significant upregulation of mRNAs encoding the endopeptidase matrix metalloproteinase 2 (MMP-2), the transmembrane protein amyloid precursor protein, the interleukin-1 receptor-related Fos-inducible transcript, and the cytokine stromal cell-derived factor 1 alpha (SDF 1 alpha). Immunohistochemical studies of the corresponding or associated proteins in human SCA3 brain tissue confirmed these findings, showing increased expression of MMP-2 and amyloid beta-protein (Abeta) in pontine neurons containing nuclear inclusions. In addition, extracellular Abeta-immunoreactive deposits were detected in human SCA3 pons. Furthermore, pontine neurons of SCA3 brains strongly expressed the antiinflammatory interleukin-1 receptor antagonist, the proinflammatory cytokine interleukin-1 beta, and the proinflammatory chemokine SDF1. Finally, increased numbers of reactive astrocytes and activated microglial cells were found in SCA3 pons. These results suggest that inflammatory processes are involved in the pathogenesis of SCA3.

[0852] Hoshino K, Tsutsui H, Kawai T, Takeda K, Nakanishi K, Takeda Y, Akira S. Cutting edge: generation of IL-18 receptor-deficient mice: evidence for IL-1 receptor-related protein as an essential IL-18 binding receptor. J Immunol May 1, 1999;162(9):5041-4

[0853] IL-18 is a proinflammatory cytokine that plays an important role in NK cell activation and Th1cell response. Recently IL-1R-related protein (IL-1Rrp) has been cloned as the receptor for IL-18. However, the functional role of IL-1Rrp is still controversial due to its low affinity to IL-18 as well as the possibility of the presence of another high-affinity binding receptor. In the present study, we have generated and characterized IL-1Rrp-deficient mice. The binding of murine rIL-18 was not detected in Th1-developing splenic CD4+ T cells isolated from IL-1Rrp-deficient mice. The activation of NF-kappa B or c-Jun N-terminal kinase were also not observed in the Th1cells. NK cells from IL-1Rrp-deficient mice had defects in cytolytic activity and IFN-gamma production in response to IL-18. ml cell development was also impaired in IL-1Rrp-deficient mice. These data demonstrate that IL-1Rrp is a ligand-binding receptor that is essential for IL-18-mediated signaling events.

[0854] Fiorucci S, Antonelli E, Burgaud J L, Morelli A. Nitric oxide-releasing NSAIDs: a review of their current status. Drug Saf 200 1;24(11):801-11

[0855] Nonsteroidal anti-inflammatory drugs (NSAIDs) are among the most widely prescribed drugs worldwide owing to their anti-inflammatory, antipyretic and analgesic properties. However, their use is hampered by gastrointestinal (GI) toxicity, the most common drug-related serious adverse event in industrialised nations. Nitric oxide (NO)-releasing NSAIDs, a recently described class of drugs, are generated by adding a nitroxybutyl or a nitrosothiol moiety to the parent NSAID via a short-chain ester linkage. While efficacy of nitrosothiol-NO-NSAIDs still awaits investigation, nitroxybutyl-NO-NSAIDs have been extensively studied in animals, thus the abbreviation NO-NSAIDs used here refers to the latter group of NSAID derivatives. NO-NSAIDs retain the anti-inflammatory and antipyretic activity of original NSAIDs, although they exhibit markedly reduced gastrointestinal toxicity. NO-NSAIDs are nonselective cyclo-oxygenase (COX) inhibitors, and they also exert COX-independent activities that are NO-dependent. Indeed, NO-NSAIDs suppress production of the cytokines interleukin (IL)-1beta, IL-18 and interferon-gamma by causing the S-nitrosilation/inhibition of caspase-1. In acute and chronic animal models of inflammation, it has been demonstrated that NO-NSAIDs abrogated prostaglandin E2 as well as thromboxane B2 generation. In a murine model, NO-naproxen was approximately 10-fold more potent than naproxen in reducing animal writhing after intraperitoneal injection of acetic acid. Similar data have been obtained in chronic models of pain such as rat adjuvant arthritis. In vivo and in vitro studies suggest that NO-aspirin (acetylsalicylic acid) exerts more potent antithrombotic action than aspirin, probably by coupling the ability to inhibit COX-1 with the anti-adhesive effect of NO. Moreover, in a model of renal injury NO-flurbiprofen not only has been demonstrated to be devoid of nephrotoxicity but also to ameliorate renal function. Finally, in an animal model of chronic neurodegenerative disease, NO-flurbiprofen and NO-aspirin attenuated the brain inflammatory response. The GI toxicity of NO-flurbiprofen and NO-naproxen is currently being investigated in healthy individuals.

[0856] Stoll G, Jander S, Schroeter M. Cytokines in CNS disorders: neurotoxicity versus neuroprotection. J Neural Transm Suppl 2000;59:81-9

[0857] Cytokines orchestrate T cell-mediated immune responses. In experimental autoimmune encephalomyelitis (EAE) the proinflammatory cytokines interferon (IFN)-gamma, tumor necrosis factor (TNF)-alpha, interleukin (IL)-1beta, IL-6, IL-12 and IL-18 are critically involved in the initiation and amplification of the local immune response in the CNS which is counter-balanced by upregulation of antiinflammatory cytokines such as IL-10. The predicted function of individual cytokines during EAE has recently been challenged by transgenic animal studies and neutralization experiments. Cytokine induction is not restricted to autoimmunity in the nervous system. Cytokines are involved in nerve regeneration and induced in focal cerebral ischemia both at the site of infarction and in remote nonischemic brain regions. In cerebral ischemia TNF-alpha and IL-1beta probably have dual functions: In concert with upregulation of inducible NO synthase (iNOS) they exert neurotoxicity while in the absence of iNOS, TNF-alpha and IL-1beta may contribute to neuroprotection and plasticity. The interplay between glial cells, infiltrating leukocytes and induced cytokines leading to CNS pathology is complex and incompletely understood. Further assessment of the functional contribution of cytokines critically depends on the elucidation of downstream secondary signaling mechanisms.

[0858] Masada T, Hua Y, Xi G, Yang G Y, Hoff J T, Keep R F. Attenuation of intracerebral hemorrhage and thrombin-induced brain edema by overexpression of interleukin-1receptor antagonist. J Neurosurg October 2001;95(4):680-6

[0859] OBJECT: Adenovirus-mediated overexpression of interleukin-1 receptor antagonist (IL-1ra) attenuates the inflammatory reaction and brain injury that follows focal cerebral ischemia. Recently, an inflammatory reaction after intracerebral hemorrhage (ICH) was identified. In this study the authors examine the hypothesis that overexpression of IL-1ra reduces brain injury (specifically edema formation) after ICH. METHODS: Adenoviruses expressing IL-1ra (Ad.RSVIL-1ra) or LacZ, a control protein (Ad.RSVlacZ), or saline were injected into the left lateral cerebral ventricle in rats. On the 5th day after virus injection, 100 microl of autologous blood or 5 U thrombin was infused into the right basal ganglia. Rats with ICH were killed 24 or 72 hours later for measurement of brain water and ion content. Thrombin-treated rats were killed 24 hours later for edema measurements and an assessment of polymorphonuclear leukocyte (PMNL) infiltration by myeloperoxidase (MPO) assay, as well as histological evaluation. Compared with saline-treated and Ad.RSVlacZ-transduced controls, Ad.RSVIL-1ra-transduced rats had significantly attenuated edema in the ipsilateral basal ganglia 3 days after ICH (81.5+/−0.3% compared with 83.4+/−0.4% and 83.3+/−0.5% in control animals). Thrombin-induced brain edema was also reduced in Ad.RSVIL-1ra-treated rats (81.3+/31 0.4% compared with 83.2+/31 0.4% and 82.5+/−0.4% in control rats). The reduction in thrombin-induced edema was associated with a reduction in PMNL infiltration into the basal ganglia, as assessed by MPO assay (49% reduction) and histological examination. CONCLUSIONS: Overexpression of IL-1ra by using an adenovirus vector attenuated brain edema formation and thrombin-induced intracerebral inflammation following ICH. The reduction in ICH-induced edema with IL-1ra may result from reduction of thrombin-induced brain inflammation.

[0860] Panel 4.1D Summary: Ag 4811/4845/4946 Three experiments with two different probes and primers show high expression of the NOV7 transcript in keratinocytes, regardless of their treatment with TNF-a plus IL-1b. This transcript encodes for a novel IL-1 receptor related protein that may have the potential to trigger novel members of the IL-1 family members as described by Debets and al. (Ref 1 and 2). Novel IL1 receptor like molecules have been cloned and reported to lead to activation of NF-kB and IL18 production, a potent inflammatory cytokine associated with lung inflammation, IBD and psoriasis. IL1 R family members have also been shown to mediate inflammatory signals through NF-kB activation, among other signalling pathways. Therefore, modulation of the function of this receptor by the use of protein therapeutics or antibodies could potentially prevent or reduce the severity of inflammatory processes observed in inflammatory lung and skin diseases such as asthma, bronchitis, emphysema and psoriasis.

[0861] Significant levels of expression are also seen in neutrophils stimulated with TNF-a and LPS. The expression of this transcript in neutrophils suggest an important role of this receptor in innate immunity and in inflammation associated with neutrophil accummulation such as observed in inflammatory bowel diseases, psoriasis, asthma, chronic bronchitis and rheumatoid arthritis. Therefore modulation of the function of this receptor by the use of protein therapeutics or antibodies could potentially prevent or reduce these diseases.

[0862] References:

[0863] Debets R, Timans J C, Homey B, Zurawski S, Sana T R, Lo S, Wagner J, Edwards G, Clifford T, Menon S, Bazan J F, Kastelein R A. Two novel IL-1 family members, IL-1 delta and IL-1 epsilon, function as an antagonist and agonist of NF-kappa B activation through the orphan IL-1 receptor-related protein 2 J Immunol Aug. 1, 2001; 167(3):1440-6

[0864] IL-1 is of utmost importance in the host response to immunological challenges. We identified and functionally characterized two novel IL-1 ligands termed IL-1delta and IL-1 epsilon. Northern blot analyses show that these IL-1s are highly abundant in embryonic tissue and tissues containing epithelial cells (i.e., skin, lung, and stomach). In extension, quantitative real-time PCR revealed that of human skin-derived cells, only keratinocytes but not fibroblasts, endothelial cells, or melanocytes express IL-1delta and epsilon. Levels of keratinocyte IL-1delta are approximately 10-fold higher than those of IL-1epsilon. In vitro stimulation of keratinocytes with IL-1beta/TNF-alpha significantly up-regulates the expression of IL-1epsilon mRNA, and to a lesser extent of IL-1delta mRNA. In NF-kappaB-luciferase reporter assays, we demonstrated that IL-1delta and epsilon proteins do not initiate a functional response via classical IL-1R pairs, which confer responsiveness to IL-1alpha and beta or IL-18. However, IL-1epsilon activates NF-kappaB through the orphan IL-1R-related protein 2 (IL-1Rrp2), whereas IL-1delta, which shows striking homology to IL-1 receptor antagonist, specifically and potently inhibits this IL-1epsilon response. In lesional psoriasis skin, characterized by chronic cutaneous inflammation, the mRNA expression of both IL-1 ligands as well as IL-1Rrp2 are increased relative to normal healthy skin. In total, IL-1delta and epsilon and IL-1Rrp2 may constitute an independent signaling system, analogous to IL-1alphabeta/receptor agonist and IL-1R1, that is present in epithelial barriers of our body and takes part in local inflammatory responses.

[0865] Parnet P, Garka K E, Bonnert T P, Dower S K, Sims J E. IL-1Rrp is a novel receptor-like molecule similar to the type I interleukin-1 receptor and its homologues T1/ST2 and IL-1R AcP.:2-J Biol Chem Feb. 23, 1996;271(8):3967-70

[0866] A novel member of the interleukin-1 receptor family has been cloned by polymerase chain reaction using degenerate oligonucleotide primers derived from regions of sequence conservation, using as template a yeast artificial chromosome known to contain both interleukin-1 (IL-1) receptors and T1/ST2. The new receptor, called IL-1 receptor-related protein or IL-1Rrp, fails to bind any of the known IL-1 ligands. A chimeric receptor, in which the IL-1 Rrp cytoplasmic domain is fused to the extracellular and transmembrane regions of the IL-1 receptor, responds to IL-1 following transfection into COS cells by activation of NFkappaB and induction of IL-8 promoter function.

[0867] NOV1a

[0868] Expression of gene NOVIA was assessed using the primer-probe sets Ag2451 and Ag1455, described in Tables 40 and 41. Results of the RTQ-PCR runs are shown in Tables 42, 43, 44, 45, and 46.

TABLE 40

Probe Name Ag2451

| | | | | |
|---|---|---|---|---|
| Primers | Sequences | Length | Start Positon | SEQ ID NO: |

| | | | | |
|---|---|---|---|---|
| Forward | 5′-ggccaagtaatgacaatttgaa-3′ | 22 | 362 | 193 |
| Probe | TET-5′-tcagtttattcctaacaatgagaacgca-3′-TAMRA | 28 | 405 | 194 |
| Reverse | 5′tgcaaaatgttatcagcttgtg-3′ | 22 | 440 | 195 |

[0869] TABLE 41

Probe Name Ag1455

| | | | | |
|---|---|---|---|---|
| Primers | Sequences | Length | Start Positon | SEQ ID NO: |

| | | | | |
|---|---|---|---|---|
| Forward | 5′-caggatttggatccattgtaga-3′ | 22 | 998 | 196 |
| Probe | TET-5′-caaaatacacttcggcaagccagagt-3′-TAMRA | 26 | 1033 | 197 |
| Reverse | 5′cacatcagtgcttatggtttcc-3′ | 22 | 1059 | 198 |

[0870] TABLE 42
AI_comprehensive panel_v1.0

| | Rel. Exp. (%) Ag2451, | | Rel. Exp. (%) Ag2451, |
|---|---|---|---|
| Tissue Name | Run 228157424 | Tissue Name | Run 228157424 |
| 110967 COPD-F | 19.2 | 112427 Match Control | 7.7 |
| | | Psoriasis-F | |
| 110980 COPD-F | 3.0 | 112418 Psoriasis-M | 40.1 |
| 110968 COPD-M | 39.2 | 112723 Match Control | 24.1 |
| | | Psoriasis-M | |
| 110977 COPD-M | 2.7 | 112419 Psoriasis-M | 15.0 |
| 110989 Emphysema-F | 14.6 | 112424 Match Control | 11.4 |
| | | Psoriasis-M | |
| 110992 Emphysema-F | 0.0 | 112420 Psoriasis-M | 100.0 |
| 110993 Emphysema-F | 4.9 | 112425 Match Control | 5.5 |
| | | Psoriasis-M | |
| 110994 Emphysema-F | 5.2 | 104689 (MF) OA | 17.3 |
| | | Bone-Backus | |
| 110995 Emphysema-F | 8.3 | 104690 (MF) Adj | 12.2 |
| | | “Normal⇄ Bone-Backus | |
| 110996 Emphysema-F | 0.0 | 104691 (MF) OA | 8.1 |
| | | Synovium-Backus | |
| 110997 Asthma-M | 21.9 | 104692 (BA) OA | 7.7 |
| | | Cartilage-Backus | |
| 111001 Asthma-F | 0.0 | 104694 (BA) OA | 9.0 |
| | | Bone-Backus | |
| 111002 Asthma-F | 5.3 | 104695 (BA) Adj | 2.9 |
| | | “Normal⇄ Bone-Backus | |
| 111003 Atopic | 5.3 | 104696 (BA) OA | 24.1 |
| Asthma-F | | Synovium-Backus | |
| 111004 Atopic | 22.7 | 104700 (SS) OA Bone- | 0.0 |
| Asthma-F | | Backus | |
| 111005 Atopic | 7.6 | 104701 (SS) Adj | 8.1 |
| Asthma-F | | “Normal⇄ Bone-Backus | |
| 111006 Atopic | 0.0 | 104702 (SS) OA | 6.7 |
| Asthma-F | | Synovium-Backus | |
| 111417 Allergy-M | 6.1 | 117093 OA Cartilage | 55.1 |
| | | Rep7 | |
| 112347 Allergy-M | 0.0 | 112672 OA Bone5 | 25.0 |
| 112349 Normal Lung-F | 0.0 | 112673 OA Synovium5 | 8.0 |
| 112357 Normal Lung-F | 9.4 | 112674 OA Synovial | 2.6 |
| | | Fluid cells5 | |
| 112354 Normal Lung-M | 8.5 | 117100 OA Cartilage | 0.0 |
| | | Rep14 | |
| 112374 Crohns-F | 27.0 | 112756 OA Bone9 | 15.2 |
| 112389 Match | 32.5 | 112757 OA Synovium9 | 4.0 |
| Control Crohns-F | | | |
| 112375 Crohns-F | 11.3 | 112758 OA Synovial | 3.4 |
| | | Fluid Cells9 | |
| 112732 Match | 20.9 | 117125 RA Cartilage | 3.8 |
| Control Crohns-F | | Rep2 | |
| 112725 Crohns-M | 17.8 | 113492 Bone2 RA | 6.0 |
| 112387 Match | 0.0 | 113493 Synovium2 RA | 2.1 |
| Control Crohns-M | | | |
| 112378 Crohns-M | 0.7 | 113494 Syn Fluid Cells | 0.0 |
| | | RA | |
| 112390 Match | 33.7 | 113499 Cartilage4 RA | 2.8 |
| Control Crohns-M | | | |
| 112726 Crohns-M | 12.2 | 113500 Bone4 RA | 0.0 |
| 112731 Match | 0.0 | 113501 Synovium4 RA | 4.8 |
| Control Crohns-M | | | |
| 112380 Ulcer Col-F | 39.8 | 113502 Syn Fluid | 8.1 |
| | | Cells4 RA | |
| 112734 Match | 37.9 | 113495 Cartilage3 RA | 0.0 |
| Control Ulcer Col-F | | | |
| 112384 Ulcer Col-F | 19.5 | 113496 Bone3 RA | 0.0 |
| 112737 Match | 2.7 | 113497 Synovium3 RA | 2.8 |
| Control Ulcer Col-F | | | |
| 112386 Ulcer Col-F | 12.9 | 113498 Syn Fluid | 2.9 |
| | | Cells3 RA | |
| 112738 Match | 0.0 | 117106 Normal | 2.4 |
| Control Ulcer Col-F | | Cartilage Rep20 | |
| 112381 Ulcer Col-M | 2.2 | 113663 Bone3 Normal | 7.5 |
| 112735 Match | 52.5 | 113664 Synovium3 | 0.0 |
| Control Ulcer Col-M | | Normal | |
| 112382 Ulcer Col-M | 88.9 | 113665 Syn Fluid | 5.5 |
| | | Cells3 Normal | |
| 112394 Match | 4.2 | 117107 Normal | 43.5 |
| Control Ulcer Col-M | | Cartilage Rep22 | |
| 112383 Ulcer Col-M | 14.6 | 113667 Bone4 Normal | 2.8 |
| 112736 Match | 3.0 | 113668 Synovium4 | 8.1 |
| Control Ulcer Col-M | | Normal | |
| 112423 Psoriasis-F | 2.3 | 113669 Syn Fluid | 17.0 |
| | | Cells4 Normal | |

[0871] TABLE 43
CNS_neurodegeneration_v1.0

| | Rel. Exp. (%) Ag2451, | | Rel. Exp. (%) Ag2451, |
|---|---|---|---|
| Tissue Name | Run 206915548 | Tissue Name | Run 206915548 |
| AD 1 Hippo | 7.1 | Control (Path) 3 | 2.8 |
| | | Temporal Ctx | |
| AD 2 Hippo | 21.8 | Control (Path) 4 | 66.9 |
| | | Temporal Ctx | |
| AD 3 Hippo | 4.4 | AD 1 Occipital Ctx | 15.1 |
| AD 4 Hippo | 18.6 | AD 2 Occipital Ctx | 0.0 |
| | | (Missing) | |
| AD 5 Hippo | 62.0 | AD 3 Occipital Ctx | 1.2 |
| AD 6 Hippo | 31.6 | AD 4 Occipital Ctx | 74.2 |
| Control 2 Hippo | 14.5 | AD 5 Occipital Ctx | 11.1 |
| Control 4 Hippo | 11.7 | AD 6 Occipital Ctx | 17.3 |
| Control (Path) 3 | 1.3 | Control 1 Occipital | 1.4 |
| Hippo | | Ctx | |
| AD 1 Temporal Ctx | 21.0 | Control 2 Occipital | 16.6 |
| | | Ctx | |
| AD 2 Temporal Ctx | 22.4 | Control 3 Occipital | 30.8 |
| | | Ctx | |
| AD 3 Temporal Ctx | 2.9 | Control 4 Occipital | 11.7 |
| | | Ctx | |
| AD 4 Temporal Ctx | 77.9 | Control (Path) 1 | 100.0 |
| | | Occipital Ctx | |
| AD 5 Inf Temporal | 26.4 | Control (Path) 2 | 22.4 |
| Ctx | | Occpital Ctx | |
| AD 5 Sup Temporal | 23.2 | Control (Path) 3 | 0.0 |
| Ctx | | Occipital Ctx | |
| AD 6 Inf Temporal | 56.3 | Control (Path) 4 | 38.7 |
| Ctx | | Occipital Ctx | |
| AD 6 Sub Temporal | 48.3 | Control 1 Parietal | 3.2 |
| Ctx | | Ctx | |
| Control 1 Temporal | 5.4 | Control 2 Parietal | 15.7 |
| Ctx | | Ctx | |
| Control 2 Temporal | 8.1 | Control 3 Parietal | 11.0 |
| Ctx | | Ctx | |
| Control 3 Temporal | 10.7 | Control (Path) 1 | 87.1 |
| Ctx | | Parietal Ctx | |
| Control 3 Temporal | 10.9 | Control (Path) 2 | 15.0 |
| Ctx | | Parietal Ctx | |
| Control (Path) 1 | 59.5 | Control (Path) 3 | 2.6 |
| Temporal Ctx | | Parietal Ctx | |
| Control (Path) 2 | 45.4 | Control (Path) 4 | 80.1 |
| Temporal Ctx | | Parietal Ctx | |

[0872] TABLE 44
Panel 1.3D

| | Rel. Exp. (%) | Rel. Exp. (%) | | Rel. Exp. (%) | Rel. Exp. (%) |
|---|---|---|---|---|---|
| | Ag2451, Run | Ag2451, Run | | Ag2451, Run | Ag2451, Run |
| Tissue Name | 159906491 | 165518159 | Tissue Name | 159906491 | 165518159 |

| | | | | | |
|---|---|---|---|---|---|
| Liver | 4.4 | 0.0 | Kidney (fetal) | 5.1 | 0.0 |
| adenocarcinoma | | | | | |
| Pancreas | 0.0 | 0.0 | Renal ca. 786-0 | 0.0 | 0.0 |
| Pancreatic ca. | 4.5 | 0.0 | Renal ca. | 3.3 | 0.0 |
| CAPAN2 | | | A498 | | |
| Adrenal gland | 5.3 | 0.0 | Renal ca. RXF | 0.0 | 0.0 |
| | | | 393 | | |
| Thyroid | 2.3 | 0.0 | Renal ca. | 0.0 | 0.0 |
| | | | ACHN | | |
| Salivary gland | 0.0 | 0.0 | Renal ca. | 0.0 | 0.0 |
| | | | UO-31 | | |
| Pituitary gland | 9.0 | 0.0 | Renal ca. | 0.0 | 0.0 |
| | | | TK-10 | | |
| Brain (fetal) | 13.0 | 12.4 | Liver | 0.0 | 0.0 |
| Brain (whole) | 2.1 | 31.2 | Liver (fetal) | 2.1 | 0.0 |
| Brain (amygdala) | 14.3 | 39.8 | Liver ca. | 13.5 | 0.0 |
| | | | (hepatoblast) | | |
| | | | HepG2 | | |
| Brain | 4.7 | 0.0 | Lung | 7.4 | 0.0 |
| (cerebellum) | | | | | |
| Brain | 18.4 | 16.4 | Lung (fetal) | 0.0 | 0.0 |
| (hippocampus) | | | | | |
| Brain | 0.0 | 0.0 | Lung ca. | 0.0 | 0.0 |
| (substantianigra) | | | (small cell) | | |
| | | | LX-1 | | |
| Brain (thalamus) | 15.4 | 42.6 | Lung ca. | 3.7 | 0.0 |
| | | | (small cell) | | |
| | | | NCI-H69 | | |
| Cerebral Cortex | 68.8 | 66.0 | Lung ca. | 39.2 | 24.7 |
| | | | (s.cell var.) | | |
| | | | SHP-77 | | |
| Spinal cord | 6.5 | 0.0 | Lung ca. (large | 0.0 | 18.8 |
| | | | cell)NCI-H460 | | |
| glio/astro | 10.5 | 0.0 | Lung ca. (non- | 0.0 | 0.0 |
| U87-MG | | | sm. cell) A549 | | |
| glio/astro | 0.0 | 0.0 | Lung ca. (non- | 3.9 | 0.0 |
| U-118-MG | | | s.cell) | | |
| | | | NCI-H23 | | |
| astrocytoma | 0.0 | 22.8 | Lung ca. (non- | 6.6 | 14.9 |
| SW1783 | | | s.cell) HOP-62 | | |
| neuro*; met | 1.6 | 0.0 | Lung ca. (non- | 0.0 | 0.0 |
| SK-N-AS | | | s.cl) NCI- | | |
| | | | H522 | | |
| astrocytoma | 0.0 | 0.0 | Lung ca. | 2.3 | 13.7 |
| SF-539 | | | (squam.) SW | | |
| | | | 900 | | |
| astrocytoma | 6.2 | 0.0 | Lung ca. | 0.0 | 0.0 |
| SNB-75 | | | (squam.) NCI- | | |
| | | | H596 | | |
| glioma SNB-19 | 21.9 | 72.7 | Mammary | 0.0 | 0.0 |
| | | | gland | | |
| glioma U251 | 3.1 | 63.3 | Breast ca.* | 2.4 | 0.0 |
| | | | (pl.ef) MCF-7 | | |
| glioma SF-295 | 0.0 | 0.0 | Breast ca.* | 9.3 | 0.0 |
| | | | (pl.ef) MDA- | | |
| | | | MB-231 | | |
| Heart (fetal) | 0.0 | 0.0 | Breast ca.* | 0.0 | 0.0 |
| | | | (pl.ef) T47D | | |
| Heart | 0.0 | 0.0 | Breast ca. BT- | 17.2 | 0.0 |
| | | | 549 | | |
| Skeletal muscle | 13.8 | 0.0 | Breast ca. | 0.0 | 23.2 |
| (fetal) | | | MDA-N | | |
| Skeletal muscle | 0.0 | 0.0 | Ovary | 3.8 | 0.0 |
| Bone marrow | 4.6 | 0.0 | Ovarian ca. | 5.5 | 0.0 |
| | | | OVCAR-3 | | |
| Thymus | 2.7 | 0.0 | Ovarian ca. | 0.0 | 0.0 |
| | | | OVCAR-4 | | |
| Spleen | 0.0 | 0.0 | Ovarian ca. | 5.2 | 0.0 |
| | | | OVCAR-5 | | |
| Lymph node | 0.0 | 0.0 | Ovarian ca. | 4.8 | 0.0 |
| | | | OVCAR-8 | | |
| Colorectal | 8.6 | 0.0 | Ovarian ca. | 3.8 | 0.0 |
| | | | IGROV-1 | | |
| Stomach | 3.9 | 15.0 | Ovarian ca.* | 3.9 | 4.7 |
| | | | (ascites) SK- | | |
| | | | OV-3 | | |
| Small intestine | 15.1 | 0.0 | Uterus | 0.0 | 15.7 |
| Colon ca. SW480 | 0.0 | 0.0 | Plancenta | 6.8 | 0.0 |
| Colon ca.* | 0.0 | 0.0 | Prostate | 0.0 | 28.1 |
| SW620(SW480 | | | | | |
| met) | | | | | |
| Colon ca. HT29 | 3.0 | 0.0 | Prostate ca.* | 0.0 | 0.0 |
| | | | (bone met) | | |
| | | | PC-3 | | |
| Colon ca. HCT- | 0.0 | 31.4 | Testis | 41.2 | 25.9 |
| 116 | | | | | |
| Colon ca. CaCo-2 | 0.0 | 0.0 | Melanoma | 0.0 | 0.0 |
| | | | Hs688(A).T | | |
| Colon ca. | 0.0 | 14.4 | Melanoma* | 0.0 | 0.0 |
| tissue(ODO3866) | | | (met) | | |
| | | | Hs688(B).T | | |
| Colon ca. HCC- | 0.0 | 0.0 | Melanoma | 0.0 | 0.0 |
| 2998 | | | UACC-62 | | |
| Gastric ca.* (liver | 100.0 | 100.0 | Melanoma | 0.0 | 0.0 |
| met) NCI-N87 | | | M14 | | |
| Bladder | 3.3 | 10.0 | Melanoma | 0.0 | 0.0 |
| | | | LOX IMVI | | |
| Trachea | 9.0 | 0.0 | Melanoma* | 0.0 | 0.0 |
| | | | (met) SK- | | |
| | | | MEL-5 | | |
| Kidney | 4.6 | 0.0 | Adipose | 0.0 | 0.0 |

[0873] TABLE 45
Panel 2D

| | Rel. Exp. (%) | Rel. Exp. (%) | | Rel. Exp. (%) | Rel. Exp. (%) |
|---|---|---|---|---|---|
| | Ag2451, Run | Ag2451, Run | | Ag2451, Run | Ag2451, Run |
| Tissue Name | 159906936 | 164977397 | Tissue Name | 159906936 | 164977397 |
| Normal Colon | 0.0 | 14.1 | Kidney | 0.0 | 0.0 |
| | | | Margin | | |
| | | | 8120608 | | |
| CC Well to Mod | 4.0 | 2.9 | Kidney Cancer | 3.8 | 0.0 |
| Diff (ODO3866) | | | 8120613 | | |
| CC Margin | 0.0 | 0.0 | Kidney | 0.0 | 1.2 |
| (ODO3866) | | | Margin | | |
| | | | 8120614 | | |
| CC Gr.2 | 0.0 | 0.0 | Kidney Cancer | 0.0 | 8.2 |
| rectosigmoid | | | 9010320 | | |
| (ODO3868) | | | | | |
| CC Margin | 1.9 | 5.1 | Kidney | 1.6 | 2.6 |
| (ODO3868) | | | Margin | | |
| | | | 9010321 | | |
| CC Mod Diff | 0.0 | 5.9 | Normal Uterus | 0.0 | 6.0 |
| (ODO3920) | | | | | |
| CC Margin | 4.3 | 11.1 | Uterus Cancer | 22.5 | 40.6 |
| (ODO3920) | | | 064011 | | |
| CC Gr.2 ascend | 5.3 | 6.0 | Normal | 0.0 | 0.0 |
| colon | | | Thyroid | | |
| (ODO3921) | | | | | |
| CC Margin | 20.9 | 2.9 | Thyroid | 1.8 | 0.0 |
| (ODO3921) | | | Cancer | | |
| | | | 064010 | | |
| CC from Partial | 3.3 | 1.1 | Thyroid | 6.6 | 7.8 |
| Hepatectomy | | | Cancer | | |
| (ODO4309) | | | A302152 | | |
| Mets | | | | | |
| Liver Margin | 2.2 | 0.0 | Thyroid | 6.4 | 0.0 |
| (ODO4309) | | | Margin | | |
| | | | A302153 | | |
| Colon mets to | 2.3 | 2.9 | Normal Breast | 9.2 | 7.7 |
| lung (OD04451- | | | | | |
| 01) | | | | | |
| Lung Margin | 0.0 | 2.8 | Breast Cancer | 0.0 | 2.7 |
| (OD04451-02) | | | (OD04566) | | |
| Normal Prostate | 0.0 | 12.0 | Breast Cancer | 5.1 | 2.4 |
| 6546-1 | | | (OD04590-01) | | |
| Prostate Cancer | 26.1 | 21.3 | Breast Cancer | 5.8 | 6.2 |
| (OD04410) | | | Mets | | |
| | | | (OD04590-03) | | |
| Prostate Margin | 6.6 | 21.3 | Breast Cancer | 30.4 | 29.3 |
| (OD04410) | | | Metastasis | | |
| | | | (OD04655-05) | | |
| Prostate Cancer | 2.1 | 7.9 | Breast Cancer | 31.6 | 11.0 |
| (OD04720-01) | | | 064006 | | |
| Prostate Margin | 0.0 | 5.7 | Breast Cancer | 20.6 | 32.1 |
| (OD04720-02) | | | 1024 | | |
| Normal Lung | 12.9 | 13.4 | Breast Cancer | 2.2 | 0.0 |
| 061010 | | | 9100266 | | |
| Lung Met to | 5.0 | 1.0 | Breast Margin | 0.0 | 0.0 |
| Muscle | | | 9100265 | | |
| (ODO4286) | | | | | |
| Muscle Margin | 0.9 | 0.0 | Breast Cancer | 10.5 | 17.4 |
| (ODO4286) | | | A209073 | | |
| Lung Malignant | 4.6 | 0.0 | Breast Margin | 12.9 | 7.4 |
| Cancer | | | A2090734 | | |
| (OD03126) | | | | | |
| Lung Margin | 4.7 | 4.3 | Normal Liver | 2.2 | 0.0 |
| (OD03126) | | | | | |
| Lung Cancer | 24.1 | 11.8 | Liver Cancer | 1.6 | 2.9 |
| (OD04404) | | | 064003 | | |
| Lung Margin | 1.4 | 1.4 | Liver Cancer | 0.0 | 0.0 |
| (OD04404) | | | 1025 | | |
| Lung Cancer | 8.5 | 11.1 | Liver Cancer | 0.0 | 0.0 |
| (OD04565) | | | 1026 | | |
| Lung Margin | 0.0 | 3.1 | Liver Cancer | 0.0 | 5.6 |
| (OD04565) | | | 6004-T | | |
| Lung Cancer | 33.4 | 54.7 | Liver Tissue | 4.0 | 0.0 |
| (OD04237-01) | | | 6004-N | | |
| Lung Margin | 6.9 | 2.9 | Liver Cancer | 0.0 | 2.9 |
| (OD04237-02) | | | 6005-T | | |
| Ocular Mel Met | 0.0 | 0.0 | Liver Tissue | 0.0 | 0.0 |
| to Liver | | | 6005-N | | |
| (ODO4310) | | | | | |
| Liver Margin | 3.8 | 0.0 | Normal | 8.4 | 11.7 |
| (ODO4310) | | | Bladder | | |
| Melanoma Mets | 1.9 | 0.0 | Bladder | 0.0 | 0.0 |
| to Lung | | | Cancer 1023 | | |
| (OD04321) | | | | | |
| Lung Margin | 2.7 | 0.0 | Bladder | 69.7 | 95.9 |
| (OD04321) | | | Cancer | | |
| | | | A302173 | | |
| Normal Kidney | 10.2 | 21.9 | Bladder | 2.8 | 1.4 |
| | | | Cancer | | |
| | | | (OD04718-01) | | |
| Kidney Ca, | 26.4 | 70.2 | Bladder | 2.2 | 5.3 |
| Nuclear grade 2 | | | Normal | | |
| (OD04338) | | | Adjacent | | |
| | | | (OD04718-03) | | |
| Kidney Margin | 12.7 | 11.6 | Normal Ovary | 3.6 | 0.0 |
| (OD04338) | | | | | |
| Kidney Ca | 22.4 | 13.7 | Ovarian | 0.0 | 0.0 |
| Nuclear grade | | | Cancer | | |
| 1/2 (OD04339) | | | 064008 | | |
| Kidney Margin | 9.9 | 8.1 | Ovarian | 0.0 | 0.0 |
| (OD04339) | | | Cancer | | |
| | | | (OD04768-07) | | |
| Kidney Ca, Clear | 100.0 | 27.5 | Ovary Margin | 0.0 | 0.0 |
| cell type | | | (OD04768-08) | | |
| (OD04340) | | | | | |
| Kidney Margin | 27.5 | 31.0 | Normal | 3.2 | 12.6 |
| (OD04340) | | | Stomach | | |
| Kidney Ca, | 2.1 | 3.2 | Gastric Cancer | 0.0 | 0.0 |
| Nuclear grade 3 | | | 9060358 | | |
| (OD04348) | | | | | |
| Kidney Margin | 3.1 | 8.7 | Stomach | 2.4 | 0.0 |
| (OD04348) | | | Margin | | |
| | | | 9060359 | | |
| Kidney Cancer | 0.0 | 10.6 | Gastric Cancer | 0.0 | 0.0 |
| (OD04622-01) | | | 9060395 | | |
| Kidney Margin | 1.5 | 2.8 | Stomach | 0.0 | 0.0 |
| (OD04622-03) | | | Margin | | |
| | | | 9060394 | | |
| Kidney Cancer | 76.8 | 100.0 | Gastric Cancer | 0.0 | 0.0 |
| (OD04450-01) | | | 9060397 | | |
| Kidney Margin | 13.7 | 36.1 | Stomach | 0.0 | 0.0 |
| (OD04450-03) | | | Margin | | |
| | | | 9060396 | | |
| Kidney Cancer | 0.0 | 0.0 | Gastric Cancer | 18.2 | 11.5 |
| 8120607 | | | 064005 | | |

[0874] TABLE 46
Panel 4D

| | Rel. Exp. (%) | Rel. Exp. (%) | Rel. Exp. (%) | | Rel. Exp. (%) | Rel. Exp. (%) | Rel. Exp. (%) |
|---|---|---|---|---|---|---|---|
| | Ag1455, Run | Ag2451, Run | Ag2451, Run | | Ag1455, Run | Ag2451, Run | Ag2451, Run |
| Tissue Name | 162599079 | 159906953 | 161683394 | Tissue Name | 162599079 | 159906953 | 161683394 |
| Secondary Th1 | 0.0 | 0.0 | 0.0 | HUVEC IL- | 0.0 | 0.0 | 0.0 |
| act | | | | 1beta | | | |
| Secondary Th2 | 0.0 | 6.7 | 9.9 | HUVEC IFN | 0.0 | 0.0 | 0.0 |
| act | | | | gamma | | | |
| Secondary Tr1 | 0.0 | 12.0 | 0.0 | HUVEC TNF | 0.0 | 0.0 | 0.0 |
| act | | | | alpha + IFN | | | |
| | | | | gamma | | | |
| Secondary Th1 | 0.0 | 0.0 | 0.0 | HUVEC TNF | 0.0 | 0.0 | 0.0 |
| rest | | | | alpha + IL4 | | | |
| Secondary Th2 | 0.0 | 0.0 | 0.0 | HUVEC IL-11 | 0.0 | 0.0 | 0.0 |
| rest | | | | | | | |
| Secondary Tr1 | 0.0 | 4.2 | 2.5 | Lung | 0.0 | 7.6 | 13.3 |
| rest | | | | Microvascular | | | |
| | | | | EC none | | | |
| Primary Th1 | 0.0 | 0.0 | 0.0 | Lung | 0.0 | 0.0 | 0.0 |
| act | | | | Microvascular | | | |
| | | | | EC TNFalpha | | | |
| | | | | + IL-1beta | | | |
| Primary Th2 | 0.0 | 0.0 | 0.0 | Microvascular | 0.0 | 0.0 | 0.0 |
| act | | | | Dermal EC | | | |
| | | | | none | | | |
| Primary Tr1 | 0.0 | 0.0 | 0.0 | Microvascular | 0.0 | 0.0 | 0.0 |
| act | | | | Dermal EC | | | |
| | | | | TNFalpha + | | | |
| | | | | IL-1beta | | | |
| Primary Th1 | 0.0 | 4.5 | 4.3 | Bronchial | 1.1 | 0.0 | 0.0 |
| rest | | | | epithelium | | | |
| | | | | TNFalpha + | | | |
| | | | | IL1beta | | | |
| Primary Th2 | 0.0 | 4.2 | 2.5 | Small airway | 13.8 | 17.7 | 3.5 |
| rest | | | | epithelium | | | |
| | | | | none | | | |
| Primary Tr1 | 0.0 | 7.2 | 11.3 | Small airway | 100.0 | 100.0 | 100.0 |
| rest | | | | epithelium | | | |
| | | | | TNFalpha + | | | |
| | | | | IL-1beta | | | |
| CD45RA CD4 | 0.0 | 0.0 | 0.0 | Coronery | 0.0 | 0.0 | 0.0 |
| lymphocyte act | | | | artery SMC | | | |
| | | | | rest | | | |
| CD45RO CD4 | 0.0 | 0.0 | 0.0 | Coronery | 0.0 | 1.6 | 0.0 |
| lymphocyte act | | | | artery SMC | | | |
| | | | | TNFalpha + | | | |
| | | | | IL-1beta | | | |
| CD8 | 0.0 | 0.0 | 0.0 | Astrocytes rest | 0.0 | 0.0 | 3.3 |
| lymphocyte act | | | | | | | |
| Secondary CD8 | 0.0 | 0.0 | 0.0 | Astrocytes | 0.0 | 3.2 | 0.0 |
| lymphocyte rest | | | | TNFalpha + | | | |
| | | | | IL-1beta | | | |
| Secondary CD8 | 0.0 | 0.0 | 0.0 | KU-812 | 7.4 | 8.0 | 15.4 |
| lymphocyte act | | | | (Basophil) rest | | | |
| CD4 | 0.0 | 0.0 | 0.0 | KU-812 | 34.4 | 17.1 | 19.5 |
| lymphocyte | | | | (Basophil) | | | |
| none | | | | PMA/ionomyc | | | |
| | | | | in | | | |
| 2ry | 0.0 | 0.0 | 0.4 | CCD1106 | 1.2 | 0.0 | 0.0 |
| Th1/Th2/Tr1_{—} | | | | (Keratinocytes) | | | |
| anti-CD95 CH11 | | | | none | | | |
| LAK cells rest | 0.0 | 0.0 | 0.0 | CCD1106 | 0.0 | 0.0 | 0.0 |
| | | | | (Keratinocytes) | | | |
| | | | | TNFalpha + | | | |
| | | | | IL-1beta | | | |
| LAK cells IL-2 | 0.0 | 0.0 | 0.0 | Liver cirrhosis | 0.0 | 19.1 | 6.4 |
| LAK cells IL-2 + | 0.0 | 0.0 | 0.0 | Lupus kidney | 0.0 | 17.3 | 8.1 |
| IL-12 | | | | | | | |
| LAK cells IL-2 + | 0.0 | 8.8 | 0.0 | NCI-H292 | 0.0 | 31.2 | 20.3 |
| IFN gamma | | | | none | | | |
| LAK cells IL-2 + | 0.0 | 0.0 | 0.0 | NCI-H292 IL-4 | 1.3 | 26.4 | 11.0 |
| IL-18 | | | | | | | |
| LAK cells | 0.0 | 0.0 | 0.0 | NCI-H292 IL-9 | 0.0 | 28.9 | 17.9 |
| PMA/ionomycin | | | | | | | |
| NK Cells IL-2 | 0.0 | 0.0 | 6.3 | NCI-H292 IL- | 0.0 | 3.8 | 5.1 |
| rest | | | | 13 | | | |
| Two Way MLR | 0.0 | 8.7 | 3.3 | NCI-H292 | 0.0 | 11.6 | 1.6 |
| 3 day | | | | IFN gamma | | | |
| Two Way MLR | 0.0 | 0.0 | 0.0 | HPAEC none | 0.0 | 0.0 | 0.0 |
| 5 day | | | | | | | |
| Two Way MLR | 0.0 | 0.0 | 0.0 | HPAEC TNF | 0.0 | 4.2 | 0.0 |
| 7 day | | | | alpha + IL-1 | | | |
| | | | | beta | | | |
| PBMC rest | 0.0 | 0.0 | 0.0 | Lung | 0.0 | 0.0 | 3.7 |
| | | | | fibroblast | | | |
| | | | | none | | | |
| PBMC PWM | 0.0 | 0.0 | 5.8 | Lung | 0.0 | 0.0 | 3.6 |
| | | | | fibroblast TNF | | | |
| | | | | alpha + IL-1 | | | |
| | | | | beta | | | |
| PBMC PHA-L | 0.0 | 4.0 | 3.5 | Lung | 0.0 | 8.4 | 0.0 |
| | | | | fibroblast IL-4 | | | |
| Ramos (B cell) | 0.0 | 0.0 | 0.0 | Lung | 0.0 | 0.0 | 2.7 |
| none | | | | fibroblast IL-9 | | | |
| Ramos (B cell) | 0.0 | 0.0 | 0.0 | Lung | 0.0 | 4.3 | 0.0 |
| ionomycin | | | | fibroblast IL- | | | |
| | | | | 13 | | | |
| B lymphocytes | 0.0 | 0.0 | 0.0 | Lung | 0.0 | 5.9 | 2.2 |
| PWM | | | | fibroblast IFN | | | |
| | | | | gamma | | | |
| B lymphocytes | 0.0 | 0.0 | 2.5 | Dermal | 0.0 | 0.0 | 0.0 |
| CD40L and IL-4 | | | | fibroblast | | | |
| | | | | CCD1070 rest | | | |
| EOL-1 dbcAMP | 0.0 | 0.0 | 0.0 | Dermal | 0.0 | 2.6 | 6.0 |
| | | | | fibroblast | | | |
| | | | | CCD1070 | | | |
| | | | | TNF alpha | | | |
| EOL-1 dbcAMP | 0.0 | 0.0 | 0.0 | Dermal | 0.0 | 0.0 | 0.0 |
| PMA/ionomycin | | | | fibroblast | | | |
| | | | | CCD1070 IL- | | | |
| | | | | 1 beta | | | |
| Dendritic cells | 0.0 | 0.0 | 0.0 | Dermal | 0.0 | 6.7 | 6.9 |
| none | | | | fibroblast IFN | | | |
| | | | | gamma | | | |
| Dendritic cells | 0.0 | 2.2 | 0.0 | Dermal | 0.0 | 0.0 | 7.6 |
| LPS | | | | fibroblast IL-4 | | | |
| Dentritic cells | 0.0 | 4.4 | 4.2 | IBD Colitis 2 | 0.0 | 12.3 | 3.9 |
| anti-CD40 | | | | | | | |
| Monocytes rest | 0.0 | 0.0 | 7.6 | IBD Crohn's | 0.0 | 0.0 | 2.5 |
| Monocytes LPS | 0.0 | 0.0 | 0.0 | Colon | 0.0 | 4.9 | 0.0 |
| Macrophages | 0.0 | 0.0 | 6.7 | Lung | 0.0 | 8.5 | 7.5 |
| rest | | | | | | | |
| Macrophages | 0.0 | 0.0 | 0.0 | Thymus | 0.0 | 8.5 | 6.4 |
| LPS | | | | | | | |
| HUVEC none | 0.0 | 0.0 | 3.6 | Kidney | 0.6 | 0.9 | 15.1 |
| HUVEC starved | 0.0 | 2.3 | 0.0 | | | | |

[0875] AI_comprehensive panel_v1.0 Summary: Ag2451 The NOV1A transcript is expressed in tissue from patients with ulcerative colitis and Crohn's disease in both the disease tissue itself and in the matched tissue which may itself be inflammed. There is also some low expression of this transcript in chronic obstructive pulmonary disorder (COPD) and asthmatic lung tissue. This expression profile is consistent with panel 4D and supports the idea that therapeutics designed to modulate the function of the protein encoded by this gene could block or inhibit inflammation or tissue damage due to lung conditions including asthma, allergies, hypersensitivity reactions, and viral infections. Thus therapeutic modulation of this gene product may reduce or eliminate the symptoms of patients suffering from Crohn's disease and ulcerative colitis. A second experiment with the same probe and primer set is not included because of a problem in one of the sample wells.

[0876] CNS_neurodegeneration_v1.0 Summary: Ag2451 Low expression of the NOV1A gene in the brain suggests a potential role for this gene product in CNS processes. However, this panel does not show any association between expression of this gene and Alzheimer's disease.

[0877] Panel 1.3D Summary: Ag2451 Two experiments with the same probe and primer set both show expression of the NOVIA gene to be restricted to a sample from the gastric cancer cell line NCI-N87 (CTs=32.8-34.7). Thus, the expression of this gene could be used to distinguish this gastric cancer sample from other samples in the panel. Moreover, therapeutic modulation of this gene, through the use of small molecule drugs, antibodies or protein therapeutics might be of benefit in the treatment of gastric cancer. A third experiment with the probe and primer set Ag1455 shows low/undetectable levels of expression in all the samples on this panel (CTs>35). (Data not shown.)

[0878] Panel 2D Summary: Ag2451 Two experiments with the same probe and primer set show highest expression of the NOV IA gene in samples derived from kidney cancer (CTs=31-32). In addition, a number of kidney cancers as well as lung cancer and a bladder cancer show expression of this gene. Thus, the expression of this gene could be used to distinguish those samples listed above from others in the panel. Moreover, therapeutic modulation of this gene, through the use of small molecule drugs, antibodies or protein therapeutics might be of benefit in the treatment of kidney, lung or bladder cancer.

[0879] Panel 3D Summary: Ag2451 A single experiment with the NOVIA gene shows low/undetectable levels of expression in all the samples on this panel (CTs>35). (Data not shown.)

[0880] Panel 4D Summary: Ag1455/Ag2451 Highest expression of the NOV1A gene is detected in small airway epithelium treated with TNFalpha+IL-1beta. Low but significant expression of this gene is also detected in the basophil cell line KU-812 treated with PMA/ionomycin. Expression in lung derived cells suggests that the protein encoed by this gene may be involved in lung disorders including asthma, allergies, chronic obstructive pulmonary disease, and emphysema. Since basophils play an important role in lung pathology and since this transcript is present in lung derived cells, therapeutics designed to modulate the function of the protein encoded by this gene may block or inhibit inflammation or tissue damage due to lung conditions including asthma, allergies, hypersensitivity reactions, and viral infections. In addition, the KU-812 cell line is a reasonable model for the inflammatory cells that take part in various bowel diseases, such as Crohn's disease, and ulcerative colitis. Therefore, therapeutics that modulate the function of this gene product may reduce or eliminate the symptoms of patients suffering from Crohn's disease and ulcerative colitis.

[0881] NOV12

[0882] Expression of gene NOV12 was assessed using the primer-probe sets Ag1489, Ag3032, Ag4335, Ag317, and Ag674, described in Tables 47, 48, 49, 50, and 51. Results of the RTQ-PCR runs are shown in Tables 52, 53, 54, 55, 56, 57, 58, 59, 60, and 61.

TABLE 47

Probe Name Ag1489

| | | | | |
|---|---|---|---|---|
| Primers | Sequences | Length | Start Positon | SEQ ID NO: |

| | | | | |
|---|---|---|---|---|
| Forward | 5′-cacagcattgaattgctctgt-3′ | 21 | 7049 | 199 |
| Probe | TET-5′-tctggattttaccaaatggcacacga-3′-TAMRA | 26 | 7096 | 200 |
| Reverse | 5′gataactttgtggtccattgga-3′ | 22 | 7125 | 201 |

[0883] TABLE 48

Probe Name Ag3032

| | | | | |
|---|---|---|---|---|
| Primers | Sequences | Length | Start Position | SEQ ID NO: |

| | | | | |
|---|---|---|---|---|
| Forward | 5′-cacctgaagaacccacagatt-3′ | 21 | 2593 | 202 |
| Probe | TET-5′-tgctattaaaactacagccatgtcaaaga-3′-TAMRA | 2627 | 203 | |
| Reverse | 5′-gcttgacatggttgggtttat-3′21 | 2658 | 204 | |

[0884] TABLE 49

Probe Name Ag4335

| | | | | |
|---|---|---|---|---|
| Primers | Sequences | Length | Start Position | SEQ ID NO: |

| | | | | |
|---|---|---|---|---|
| Forward | 5′-cacctgaagaacccacagatt-3′ | 21 | 2593 | 202 |
| Probe | TET-5′-tgctattaaaactacagccatgtcaaaga-3′-TAMRA | 2627 | 203 | |
| Reverse | 5′-gcttgacatggttgggtttat-3′21 | 2658 | 204 | |

[0885] TABLE 50

Probe Name Ag317

| | | | | |
|---|---|---|---|---|
| Primers | Sequences | Length | Start Position | SEQ ID NO: |

| | | | | |
|---|---|---|---|---|
| Forward | 5′-ggatttcgggctacacatacg-3′ | 21 | 6620 | 208 |
| Probe | TET-5 -actctccagaatcgagcagtttcactttgttg-3′-TAMRA | 32 | 6587 209 | |
| Reverse | 5′-atgccaatgggtctttgacc-3′ | 20 | 6565 | 210 |

[0886] TABLE 51

Probe Name Ag674

| | | | | |
|---|---|---|---|---|
| Primers | Sequences | Length | Start Position | SEQ ID NO: |

| | | | | |
|---|---|---|---|---|
| Forward | 5′gtcatccccactgggattt-3′ | 19 | 6635 | 211 |
| Probe | TET-5′-cgtactctccagaatcgagcagtttca-3′-TAMRA | 27 | 6595 | 212 |
| Reverse | 5-caatgggtctttgaccatca-3′ | 20 | 6569 | 213 |

[0887] TABLE 52
AI_comprehensive panel_v1.0

| | Rel. Exp. (%) Ag1489, | | Rel. Exp. (%) Ag1489, |
|---|---|---|---|
| Tissue Name | Run 226203351 | Tissue Name | Run 226203351 |
| 110967 COPD-F | 1.8 | 112427 Match Control | 28.5 |
| | | Psoriasis-F | |
| 110980 COPD-F | 12.1 | 112418 Psoriasis-M | 2.1 |
| 110968 COPD-M | 2.7 | 112723 Match Control | 6.9 |
| | | Psoriasis-M | |
| 110977 COPD-M | 0.0 | 112419 Psoriasis-M | 4.2 |
| 110989 Emphysema-F | 4.9 | 112424 Match Control | 4.4 |
| | | Psoriasis-M | |
| 110992 Emphysema-F | 5.7 | 112420 Psoriasis-M | 5.4 |
| 110993 Emphysema-F | 3.3 | 112425 Match Control | 33.2 |
| | | Psoriasis-M | |
| 110994 Emphysema-F | 1.7 | 104689 (MF) OA | 9.0 |
| | | Bone-Backus | |
| 110995 Emphysema-F | 5.2 | 104690 (MF) Adj | 8.1 |
| | | “Normal” Bone-Backus | |
| 110996 Emphysema-F | 3.1 | 104691 (MF) OA | 54.0 |
| | | Synovium-Backus | |
| 110997 Asthma-M | 0.5 | 104692 (BA) OA | 0.3 |
| | | Cartilage-Backus | |
| 111001 Asthma-F | 2.2 | 104694 (BA) OA | 20.3 |
| | | Bone-Backus | |
| 111002 Asthma-F | 2.3 | 104695 (BA) Adj | 3.1 |
| | | “Normal” Bone-Backus | |
| 111003 Atopic | 2.3 | 104696 (BA) OA | 26.4 |
| Asthma-F | | Synovium-Backus | |
| 111004 Atopic | 6.1 | 104700 (SS) OA Bone- | 2.8 |
| Asthma-F | | Backus | |
| 111005 Atopic | 2.6 | 104701 (SS) Adj | 8.6 |
| Asthma-F | | “Normal” Bone-Backus | |
| 111006 Atopic | 0.4 | 104702 (SS) OA | 14.7 |
| Asthma-F | | Synovium-Backus | |
| 111417 Allergy-M | 3.4 | 117093 OA Cartilage | 2.1 |
| | | Rep7 | |
| 112347 Allergy-M | 0.1 | 112672 OA Bone5 | 11.9 |
| 112349 Normal Lung-F | 0.2 | 112673 OA Synovium5 | 5.8 |
| 112357 Normal Lung-F | 100.0 | 112674 OA Synovial | 6.4 |
| | | Fluid cells5 | |
| 112354 Normal Lung-M | 59.0 | 117100 OA Cartilage | 0.7 |
| | | Rep14 | |
| 112374 Crohns-F | 7.3 | 112756 OA Bone9 | 2.8 |
| 112389 Match | 0.5 | 112757 OA Synovium9 | 0.8 |
| Control Crohns-F | | | |
| 112375 Crohns-F | 4.4 | 112758 OA Synovial | 6.1 |
| | | Fluid Cells9 | |
| 112732 Match | 6.1 | 117125 RA Cartilage | 3.4 |
| Control Crohns-M | | Rep2 | |
| 112725 Crohns-M | 0.9 | 113492 Bone2 RA | 40.3 |
| 112387 Match | 2.5 | 113493 Synovium2 RA | 15.8 |
| Control Crohns-M | | | |
| 112378 Crohns-M | 0.4 | 113494 Syn Fluid Cells | 25.2 |
| | | RA | |
| 112390 Match | 7.5 | 113499 Cartilage4 RA | 33.9 |
| Control Crohns-M | | | |
| 112726 Crohns-M | 2.3 | 113500 Bone4 RA | 42.6 |
| 112731 Match | 4.7 | 113501 Synovium4 RA | 26.6 |
| Control Crohns-M | | | |
| 112380 Ulcer Col-F | 2.4 | 113502 Syn Fluid | 20.0 |
| | | Cells4 RA | |
| 112734 Match | 24.1 | 113495 Cartilage3 RA | 27.2 |
| Control Ulcer Col-F | | | |
| 112384 Ulcer Col-F | 4.6 | 113496 Bone3 RA | 32.8 |
| 112737 Match | 1.6 | 113497 Synovium3 RA | 19.3 |
| Control Ulcer Col-F | | | |
| 112386 Ulcer Col-F | 1.7 | 113498 Syn Fluid | 39.5 |
| | | Cells3 RA | |
| 112738 Match | 3.2 | 117106 Normal | 0.0 |
| Control Ulcer Col-F | | Cartilage Rep20 | |
| 112381 Ulcer Col-M | 0.8 | 113663 Bone3 Normal | 0.7 |
| 112735 Match | 3.8 | 113664 Synovium3 | 0.1 |
| Control Ulcer Col-M | | Normal | |
| 112382 Ulcer Col-M | 1.0 | 113665 Syn Fluid | 0.3 |
| | | Cells3 Normal | |
| 112394 Match | 1.9 | 117107 Normal | 2.2 |
| Control Ulcer Col-M | | Cartilage Rep22 | |
| 112383 Ulcer Col-M | 4.0 | 113667 Bone4 Normal | 4.1 |
| 112736 Match | 0.6 | 113668 Synovium4 | 4.8 |
| Control Ulcer Col-M | | Normal | |
| 112423 Psoriasis-F | 8.9 | 113669 Syn Fluid | 5.8 |
| | | Cells4 Normal | |

[0888] TABLE 53
CNS_neurodegeneration_v1.0

| | Rel. Exp. (%) Ag4335, | | Rel. Exp. (%) Ag4335, |
|---|---|---|---|
| Tissue Name | Run 224348629 | Tissue Name | Run 224348629 |
| AD 1 Hippo | 38.4 | Control (Path) 3 | 5.9 |
| | | Temporal Ctx | |
| AD 2 Hippo | 87.7 | Control (Path) 4 | 37.4 |
| | | Temporal Ctx | |
| AD 3 Hippo | 26.6 | AD 1 Occipital Ctx | 20.3 |
| AD 4 Hippo | 7.4 | AD 2 Occipital Ctx | 0.0 |
| | | (Missing) | |
| AD 5 Hippo | 24.1 | AD 3 Occipital Ctx | 2.7 |
| AD 6 Hippo | 89.5 | AD 4 Occipital Ctx | 14.1 |
| Control 2 Hippo | 64.6 | AD 5 Occipital Ctx | 38.2 |
| Control 4 Hippo | 26.1 | AD 6 Occipital Ctx | 6.4 |
| Control (Path) 3 | 8.2 | Control 1 Occipital | 2.2 |
| Hippo | | Ctx | |
| AD 1 Temporal Ctx | 39.2 | Control 2 Occipital | 20.2 |
| | | Ctx | |
| AD 2 Temporal Ctx | 42.6 | Control 3 Occipital | 6.8 |
| | | Ctx | |
| AD 3 Temporal Ctx | 13.6 | Control 4 Occipital | 4.6 |
| | | Ctx | |
| AD 4 Temporal Ctx | 7.5 | Control (Path) 1 | 40.9 |
| | | Occipital Ctx | |
| AD 5 Inf Temporal | 27.0 | Control (Path) 2 | 9.2 |
| Ctx | | Occipital Ctx | |
| AD 5 Sup Temporal | 100.0 | Control (Path) 3 | 0.0 |
| Ctx | | Occipital Ctx | |
| AD 6 Inf Temporal | 28.1 | Control (Path) 4 | 9.0 |
| Ctx | | Occipital Ctx | |
| AD 6 Sup Temporal | 8.9 | Control 1 Parietal | 9.9 |
| Ctx | | Ctx | |
| Control 1 Temporal | 11.8 | Control 2 Parietal | 41.2 |
| Ctx | | Ctx | |
| Control 2 Temporal | 38.4 | Control 3 Parietal | 95 |
| Ctx | | Ctx | |
| Control 3 Temporal | 16.5 | Control (Path) 1 | 50.7 |
| Ctx | | Parietal Ctx | |
| Control 3 Temporal | 0.0 | Control (Path) 2 | 30.1 |
| Ctx | | Parietal Ctx | |
| Control (Path) 1 | 57.4 | Control (Path) 3 | 2.2 |
| Temporal Ctx | | Parietal Ctx | |
| Control (Path) 2 | 29.3 | Control (Path) 4 | 27.5 |
| Temporal Ctx | | Parietal Ctx | |

[0889] TABLE 54
General_screening_panel_v1.4

| | Rel. Exp. (%) Ag4335, | | Rel. Exp. (%) Ag4335, |
|---|---|---|---|
| Tissue Name | Run 222550589 | Tissue Name | Run 222550589 |
| Adipose | 4.7 | Renal ca. TK-10 | 0.0 |
| Melanoma* | 0.2 | Bladder | 0.5 |
| Hs688(A).T | | | |
| Melanoma* | 0.4 | Gastric ca. (liver met.) | 0.2 |
| Hs688(B).T | | NCI-N87 | |
| Melanoma* M14 | 0.1 | Gastric ca. KATO III | 0.0 |
| Melanoma* | 0.1 | Colon ca. SW-948 | 0.0 |
| LOXIMVI | | | |
| Melanoma* SK- | 0.2 | Colon ca. SW480 | 0.1 |
| MEL-5 | | | |
| Squamous cell | 0.3 | Colon ca.* (SW480 | 0.0 |
| carcinoma SCC-4 | | met) SW620 | |
| Testis Pool | 1.5 | Colon ca. HT29 | 1.8 |
| Prostate ca.* (bone | 0.3 | Colon ca. HCT-116 | 0.1 |
| met) PC-3 | | | |
| Prostate Pool | 0.2 | Colon ca. CaCo-2 | 3.8 |
| Placenta | 0.1 | Colon cancer tissue | 0.3 |
| Uterus Pool | 1.5 | Colon ca. SW1116 | 0.0 |
| Ovarian ca. | 1.1 | Colon ca. Colo-205 | 0.0 |
| OVCAR-3 | | | |
| Ovarian ca. SK-OV-3 | 0.0 | Colon ca. SW-48 | 0.0 |
| Ovarian ca. | 0.0 | Colon Pool | 2.0 |
| OVCAR-4 | | | |
| Ovarian ca. | 0.2 | Small Intestine Pool | 4.2 |
| OVCAR-5 | | | |
| Ovarian ca. IGROV-1 | 0.0 | Stomach Pool | 1.5 |
| Ovarian ca. | 0.1 | Bone Marrow Pool | 1.1 |
| OVCAR-8 | | | |
| Ovary | 3.8 | Fetal Heart | 4.9 |
| Breast ca. MCF-7 | 0.7 | Heart Pool | 2.7 |
| Breast ca. MDA- | 0.1 | Lymph Node Pool | 2.2 |
| MB-231 | | | |
| Breast ca. BT 549 | 0.2 | Fetal Skeletal Muscle | 8.2 |
| Breast ca. T47D | 0.3 | Skeletal Muscle Pool | 0.3 |
| Breast ca. MDA-N | 0.0 | Spleen Pool | 2.2 |
| Breast Pool | 2.1 | Thymus Pool | 2.1 |
| Trachea | 7.0 | CNS cancer (glio/astro) | 0.3 |
| | | U87-MG | |
| Lung | 8.5 | CNS cancer (glio/astro) | 0.4 |
| | | U-118-MG | |
| Fetal Lung | 100.0 | CNS cancer | 0.0 |
| | | (neuro;met) SK-N-AS | |
| Lung ca. NCI-N417 | 0.0 | CNS cancer (astro) SF- | 3.9 |
| | | 539 | |
| Lung ca. LX-1 | 0.0 | CNS cancer (astro) | 10.0 |
| | | SNB-75 | |
| Lung ca. NCI-H146 | 10.7 | CNS cancer (glio) | 0.0 |
| | | SNB-19 | |
| Lung ca. SHP-77 | 0.1 | CNS cancer (glio) SF- | 4.0 |
| | | 295 | |
| Lung ca. A549 | 3.3 | Brain (Amygdala) Pool | 0.5 |
| Lung ca. NCI-H526 | 0.2 | Brain (cerebellum) | 0.3 |
| Lung ca. NCI-H23 | 3.3 | Brain (fetal) | 0.4 |
| Lung ca. NCI-H460 | 0.1 | Brain (Hippocampus) | 1.6 |
| | | Pool | |
| Lung ca. HOP-62 | 2.6 | Cerebral Cortex Pool | 1.1 |
| Lung ca. NCI-H522 | 0.0 | Brain (Substantia nigra) | 0.5 |
| | | Pool | |
| Liver | 0.1 | Brain (Thalamus) Pool | 1.4 |
| Fetal Liver | 0.6 | Brain (whole) | 0.6 |
| Liver ca. HepG2 | 0.0 | Spinal Cord Pool | 0.7 |
| Kidney Pool | 8.0 | Adrenal Gland | 3.8 |
| Fetal Kidney | 1.6 | Pituitary gland Pool | 3.0 |
| Renal ca. 786-0 | 0.3 | Salivary Gland | 1.7 |
| Renal ca. A498 | 0.2 | Thyroid (female) | 1.0 |
| Renal ca. ACHN | 0.0 | Pancreatic ca. CAPAN2 | 0.0 |
| Renal ca. UO-31 | 0.0 | Pancreas Pool | 2.4 |

[0890] TABLE 55
Panel 1

| | Rel. Exp. (%) Ag317, | | Rel. Exp. (%) Ag317, |
|---|---|---|---|
| Tissue Name | Run 88164410 | Tissue Name | Run 88164410 |
| Endothelial cells | 0.0 | Renal ca. 786-0 | 0.0 |
| Endothelial cells | 0.0 | Renal ca. A498 | 0.0 |
| (treated) | | | |
| Pancreas | 0.0 | Renal ca. RXF 393 | 0.0 |
| Pancreatic ca. CAPAN 2 | 0.0 | Renal ca. ACHN | 0.0 |
| Adrenal gland | 6.1 | Renal ca. UO-31 | 0.0 |
| Thyroid | 1.0 | Renal ca. TK-10 | 0.0 |
| Salivary gland | 11.0 | Liver | 0.7 |
| Pituitary gland | 1.1 | Liver (fetal) | 0.0 |
| Brain (fetal) | 0.0 | Liver ca. (hepatoblast) | 0.0 |
| | | HepG2 | |
| Brain (whole) | 0.0 | Lung | 0.0 |
| Brain (amygdala) | 0.2 | Lung (fetal) | 37.9 |
| Brain (cerebellum) | 2.3 | Lung ca. (small cell) | 0.0 |
| | | LX-1 | |
| Brain (hippocampus) | 0.1 | Lung ca. (small cell) | 0.0 |
| | | NCI-H69 | |
| Brain (substantia nigra) | 0.1 | Lung ca. (s.cell var.) | 0.0 |
| | | SHP-77 | |
| Brain (thalamus) | 0.0 | Lung ca. (large | 0.0 |
| | | cell)NCI-H460 | |
| Brain (hypothalamus) | 0.1 | Lung ca. (non-sm. | 0.1 |
| | | cell) A549 | |
| Spinal cord | 0.2 | Lung ca. (non-s.cell) | 0.0 |
| | | NCI-H23 | |
| glio/astro U87-MG | 0.0 | Lung ca. (non-s.cell) | 0.0 |
| | | HOP-62 | |
| glio/astro U-118-MG | 0.0 | Lung ca. (non-s.cl) | 0.0 |
| | | NCI-H522 | |
| astrocytoma SW1783 | 0.0 | Lung ca. (squam.) SW | 0.4 |
| | | 900 | |
| neuro*; met SK-N-AS | 0.0 | Lung ca. (squam.) | 0.3 |
| | | NCI-H596 | |
| astrocytoma SF-539 | 0.0 | Mammary gland | 0.0 |
| astrocytoma SNB-75 | 0.0 | Breast ca.* (pl.ef) | 0.0 |
| | | MCF-7 | |
| glioma SNB-19 | 0.0 | Breast ca.* (pl.ef) | 0.0 |
| | | MDA-MB-231 | |
| glioma U251 | 0.0 | Breast ca.* (pl. ef) | 0.0 |
| | | T47D | |
| glioma SF-295 | 0.4 | Breast ca. BT-549 | 0.0 |
| Heart | 7.2 | Breast ca. MDA-N | 0.0 |
| Skeletal muscle | 0.0 | Ovary | 2.0 |
| Bone marrow | 0.0 | Ovarian Ca. OVCAR-3 | 0.0 |
| Thymus | 0.4 | Ovarian ca. OVCAR-4 | 0.0 |
| Spleen | 1.4 | Ovarian ca. OVCAR-5 | 0.0 |
| Lymph node | 13.6 | Ovarian ca. OVCAR-8 | 0.0 |
| Colon (ascending) | 0.7 | Ovarian ca. IGROV-1 | 0.0 |
| Stomach | 2.8 | Ovarian ca. (ascites) | 0.0 |
| | | SK-OV-3 | |
| Small intestine | 15.5 | Uterus | 0.0 |
| Colon ca. SW480 | 0.0 | Placenta | 12.0 |
| Colon ca.* SW620 | 0.0 | Prostate | 0.0 |
| (SW480 met) | | | |
| Colon ca. HT29 | 0.0 | Prostate ca.* (bone | 0.0 |
| | | met) PC-3 | |
| Colon ca. HCT-116 | 0.0 | Testis | 100.0 |
| Colon ca. CaCo-2 | 0.1 | Melanoma | 0.0 |
| | | Hs688(A).T | |
| Colon ca. HCT-15 | 0.0 | Melanoma* (met) | 0.0 |
| | | Hs688(B).T | |
| Colon ca. HCC-2998 | 0.0 | Melanoma UACC-62 | 0.0 |
| Gastric ca. * (liver met) | 0.0 | Melanoma M14 | 0.0 |
| NCI-N87 | | | |
| Bladder | 2.8 | Melanoma LOX | 0.0 |
| | | IMVI | |
| Trachea | 2.3 | Melanoma* (met) SK- | 0.0 |
| | | MEL-5 | |
| Kidney | 0.0 | Melanoma SK-MEL- | 0.0 |
| | | 28 | |
| Kidney (fetal) | 0.0 | | |

[0891] TABLE 56
Panel 1.1

| | Rel. Exp. (%) Ag674, | | Rel. Exp. (%) Ag674, |
|---|---|---|---|
| Tissue Name | Run 109485186 | Tissue Name | Run 109485186 |
| Adrenal gland | 29.9 | Renal ca. UO-31 | 0.2 |
| Bladder | 0.7 | Renal ca. RXF 393 | 0.1 |
| Brain (amygdala) | 2.8 | Liver | 6.1 |
| Brain (cerebellum) | 6.8 | Liver (fetal) | 1.8 |
| Brain (hippocampus) | 9.4 | Liver ca. | 0.1 |
| | | (hepatoblast) HepG2 | |
| Brain (substantia | 16.5 | Lung | 49.7 |
| nigra) | | | |
| Brain (thalamus) | 4.8 | Lung (fetal) | 59.9 |
| Cerebal Cortex | 2.9 | Lung ca. (non-s.cell) | 61.6 |
| | | HOP-62 | |
| Brain (fetal) | 3.4 | Lung ca. (large | 2.7 |
| | | cell)NCI-H460 | |
| Brain (whole) | 8.4 | Lung ca. (non-s.cell) | 6.5 |
| | | NCI-H23 | |
| glio/astro U-118-MG | 0.9 | Lung ca. (non-s.cl) | 1.1 |
| | | NCI-H522 | |
| astrocytoma SF-539 | 0.8 | Lung ca. (non-sm. | 15.0 |
| | | cell) A549 | |
| astrocytoma SNB-75 | 3.7 | Lung ca. (s.cell var.) | 0.1 |
| | | SHP-77 | |
| astrocytoma SW1783 | 5.0 | Lung ca. (small cell) | 0.4 |
| | | LX-1 | |
| glioma U251 | 1.7 | Lung ca. (small cell) | 3.1 |
| | | NCI-H69 | |
| glioma SF-295 | 15.8 | Lung ca. (squam.) | 7.2 |
| | | SW 900 | |
| glioma SNB-19 | 1.1 | Lung ca. (squam.) | 22.1 |
| | | NCI-H596 | |
| glio/astro U87-MG | 1.1 | Lymph node | 17.1 |
| neuro*; met SK-N-AS | 0.0 | Spleen | 3.2 |
| Mammary gland | 69.3 | Thymus | 2.7 |
| Breast ca. BT-549 | 0.0 | Ovary | 14.2 |
| Breast ca. MDA-N | 0.1 | Ovarian ca. IGROV-1 | 0.2 |
| Breast ca.* (pl.ef) | 0.9 | Ovarian ca. OVCAR-3 | 12.6 |
| T47D | | | |
| Breast ca.* (pl.ef) | 1.8 | Ovarian ca. OVCAR-4 | 0.0 |
| MCF-7 | | | |
| Breast ca.* (pl.ef) | 0.0 | Ovarian ca. OVCAR-5 | 4.6 |
| MDA-MB-231 | | | |
| Small intestine | 30.6 | Ovarian ca. OVCAR-8 | 0.5 |
| Colorectal | 0.9 | Ovarian ca.* (ascites) | 0.1 |
| | | SK-OV-3 | |
| Colon ca. HT29 | 6.6 | Pancreas | 24.3 |
| Colon ca. CaCo-2 | 4.3 | Pancreatic ca. | 0.0 |
| | | CAPAN 2 | |
| Colon ca. HCT-15 | 0.1 | Pituitary gland | 29.3 |
| Colon ca. HCT-116 | 0.2 | Placenta | 12.8 |
| Colon ca. HCC-2998 | 2.3 | Prostate | 0.8 |
| Colon ca. SW480 | 0.2 | Prostate ca.* (bone | 0.9 |
| | | met) PC-3 | |
| Colon ca.* SW620 | 0.1 | Salivary gland | 65.1 |
| (SW480 met) | | | |
| Stomach | 9.1 | Trachea | 26.6 |
| Gastric ca. (liver met) | 0.5 | Spinal cord | 6.6 |
| NCI-N87 | | | |
| Heart | 100.0 | Testis | 45.7 |
| Skeletal muscle (Fetal) | 5.0 | Thyroid | 13.6 |
| Skeletal muscle | 6.3 | Uterus | 7.9 |
| Endothelial cells | 0.0 | Melanoma M14 | 0.9 |
| Heart (Fetal) | 12.0 | Melanoma LOX | 0.1 |
| | | IMVI | |
| Kidney | 8.3 | Melanoma UACC-62 | 0.1 |
| Kidney (fetal) | 3.7 | Melanoma SK-MEL- | 6.1 |
| | | 28 | |
| Renal ca. 786-0 | 0.2 | Melanoma* (met) | 0.3 |
| | | SK-MEL-5 | |
| Renal ca. A498 | 0.3 | Melanoma | 0.2 |
| | | Hs688(A).T | |
| Renal ca. ACHN | 0.0 | Melanoma* (met) | 0.4 |
| | | Hs688(B).T | |
| Renal ca. TK-10 | 0.2 | | |

[0892] TABLE 57
Panel 1.2

| | Rel. Exp. (%) | Rel. Exp. (%) | | Rel. Exp. (%) | Rel. Exp. (%) |
|---|---|---|---|---|---|
| | Ag1489, Run | Ag674, Run | | Ag1489, Run | Ag674, Run |
| Tissue Name | 141889869 | 118424516 | Tissue Name | 141889869 | 118424516 |
| Endothelial cells | 0.0 | 2.2 | Rena1 ca. 786-0 | 0.1 | 0.0 |
| Heart (Fetal) | 12.7 | 3.9 | Renal ca. A498 | 0.1 | 0.3 |
| Pancreas | 0.4 | 17.8 | Renal ca. RXF | 0.0 | 0.1 |
| | | | 393 | | |
| Pancreatic ca. | 0.0 | 0.0 | Renal ca. | 0.2 | 0.0 |
| CAPAN 2 | | | ACHN | | |
| Adrenal Gland | 24.1 | 42.6 | Renal ca. | 0.2 | 0.4 |
| | | | UO-31 | | |
| Thyroid | 0.2 | 29.1 | Renal ca. TK-10 | 0.4 | 0.1 |
| Salivary gland | 93.3 | 54.7 | Liver | 1.8 | 7.0 |
| Pituitary gland | 0.5 | 47.6 | Liver (fetal) | 0.7 | 3.7 |
| Brain (fetal) | 0.0 | 2.0 | Liver ca. | 0.1 | 0.0 |
| | | | (hepatoblast) | | |
| | | | HepG2 | | |
| Brain (whole) | 0.1 | 6.1 | Lung | 1.1 | 75.3 |
| Brain | 1.8 | 9.3 | Lung (fetal) | 1.5 | 74.7 |
| (amygdala) | | | | | |
| Brain | 0.4 | 1.1 | Lung ca. | 0.1 | 0.1 |
| (cerebellum) | | | (small cell) | | |
| | | | LX-1 | | |
| Brain | 2.9 | 9.5 | Lung ca. | 0.7 | 1.1 |
| (hippocampus) | | | (small cell) | | |
| | | | NCI-H69 | | |
| Brain (thalamus) | 0.7 | 2.1 | Lung ca. (s.cell | 0.1 | 0.5 |
| | | | var.) SHP-77 | | |
| Cerebral Cortex | 2.6 | 1.5 | Lung ca. (large | 0.3 | 0.9 |
| | | | cell)NCI-H460 | | |
| Spinal cord | 0.2 | 5.8 | Lung ca. (non- | 2.4 | 8.8 |
| | | | sm. cell) A549 | | |
| glio/astro | 0.8 | 0.5 | Lung ca. (non- | 2.1 | 5.5 |
| U87-MG | | | s.cell) | | |
| | | | NCI-H23 | | |
| glio/astro U- | 0.8 | 0.6 | Lung ca. (non- | 13.2 | 19.6 |
| 118-MG | | | s.cell) HOP-62 | | |
| astrocytoma | 1.5 | 4.6 | Lung ca. (non- | 2.5 | 1.2 |
| SW1783 | | | s.cl) NCI-H522 | | |
| neuro*; met | 0.0 | 0.1 | Lung ca. | 2.8 | 5.9 |
| SK-N-AS | | | (squam.) SW | | |
| | | | 900 | | |
| astrocytoma | 0.3 | 0.9 | Lung ca. | 5.4 | 11.0 |
| SF-539 | | | (squam.) | | |
| | | | NCI-H596 | | |
| astrocytoma | 0.9 | 2.4 | Mammary | 2.4 | 67.4 |
| SNB-75 | | | gland | | |
| glioma SNB-19 | 0.4 | 0.5 | Breast ca.* | 1.2 | 1.3 |
| | | | (pl.ef) MCF-7 | | |
| glioma U251 | 0.5 | 0.6 | Breast ca.* | 0.0 | 0.0 |
| | | | (pl.ef) MDA- | | |
| | | | MB-231 | | |
| glioma SF-295 | 7.2 | 15.4 | Breast ca.* (pl. | 0.3 | 0.6 |
| | | | ef) T47D | | |
| Heart | 100.0 | 82.9 | Breast ca. | 0.2 | 0.0 |
| | | | BT-549 | | |
| Skeletal Muscle | 1.7 | 6.2 | Breast ca. | 0.1 | 0.2 |
| | | | MDA-N | | |
| Bone marrow | 0.7 | 1.7 | Ovary | 25.2 | 7.0 |
| Thymus | 0.3 | 3.9 | Ovarian ca. | 1.4 | 5.0 |
| | | | OVCAR-3 | | |
| Spleen | 0.8 | 4.7 | Ovarian ca. | 0.0 | 0.0 |
| | | | OVCAR-4 | | |
| Lymph node | 0.3 | 19.3 | Ovarian ca. | 1.4 | 1.9 |
| | | | OVCAR-5 | | |
| Colorectal | 0.5 | 0.5 | Ovarian ca. | 0.9 | 0.1 |
| Tissue | | | OVCAR-8 | | |
| Stomach | 0.2 | 9.3 | Ovarian ca. | 0.1 | 0.1 |
| | | | IGROV-1 | | |
| Small intestine | 8.1 | 55.9 | Ovarian ca. | 0.2 | 0.0 |
| | | | (ascites) SK- | | |
| | | | OV-3 | | |
| Colon ca. | 0.2 | 0.0 | Uterus | 2.4 | 14.9 |
| SW480 | | | | | |
| Colon ca.* | 0.1 | 0.0 | Placenta | 2.9 | 17.0 |
| SW620 (SW480 | | | | | |
| met) | | | | | |
| Colon ca. HT29 | 2.3 | 5.3 | Prostate | 0.9 | 1.5 |
| Colon ca. | 0.4 | 0.1 | Prostate ca.* | 0.3 | 0.8 |
| HCT-116 | | | (bone met) PC-3 | | |
| Colon ca. CaCo-2 | 3.7 | 5.0 | Testis | 0.8 | 100.0 |
| Colon ca. Tissue | 0.0 | 0.3 | Melanoma | 0.1 | 0.1 |
| (ODO3866) | | | Hs688(A).T | | |
| Colon ca. HCC- | 1.3 | 1.4 | Melanoma* | 0.2 | 0.9 |
| 2998 | | | (met) | | |
| | | | Hs688(B).T | | |
| Gastric ca.* | 0.2 | 0.3 | Melanoma | 0.4 | 0.0 |
| (liver met) NCI- | | | UACC-62 | | |
| N87 | | | | | |
| Bladder | 2.0 | 0.3 | Melanoma | 0.3 | 0.5 |
| | | | M14 | | |
| Trachea | 9.0 | 33.2 | Melanoma | 0.0 | 0.1 |
| | | | LOX IMVI | | |
| Kidney | 4.7 | 2.8 | Melanoma* | 0.1 | 0.5 |
| | | | (met) SK- | | |
| | | | MEL-5 | | |
| Kidney (fetal) | 0.9 | 2.5 | | | |

[0893] TABLE 58
Panel 1.3D

| | Rel. Exp. (%) | Rel. Exp. (%) | | Rel. Exp. (%) | Rel. Exp. (%) |
|---|---|---|---|---|---|
| | Ag1489, Run | Ag1489, Run | | Ag1489, Run | Ag1489, Run |
| Tissue Name | 152615469 | 152615562 | Tissue Name | 152615469 | 152615562 |
| Liver | 0.2 | 0.0 | Kidney (fetal) | 0.7 | 1.5 |
| adenocarcinoma | | | | | |
| Pancreas | 1.9 | 1.7 | Renal ca. 786-0 | 0.6 | 0.7 |
| Pancreatic ca. | 0.2 | 0.0 | Renal ca. | 8.5 | 8.2 |
| CAPAN 2 | | | A498 | | |
| Adrenal gland | 8.2 | 18.3 | Renal ca. RXF | 0.0 | 0.2 |
| | | | 393 | | |
| Thyroid | 7.2 | 6.5 | Renal ca. | 0.0 | 0.0 |
| | | | ACHN | | |
| Salivary gland | 4.2 | 13.9 | Renal ca. | 0.1 | 0.1 |
| | | | UO-31 | | |
| Pituitary gland | 9.0 | 7.7 | Renal ca. | 0.0 | 0.1 |
| | | | TK-10 | | |
| Brain (fetal) | 1.1 | 0.6 | Liver | 1.9 | 1.3 |
| Brain (whole) | 1.7 | 2.0 | Liver (fetal) | 2.5 | 3.6 |
| Brain (amygdala) | 6.3 | 12.7 | Liver ca. | 0.0 | 0.2 |
| | | | (hepatoblast) | | |
| | | | HepG2 | | |
| Brain | 0.3 | 0.7 | Lung | 67.8 | 100.0 |
| (cerebellum) | | | | | |
| Brain | 17.3 | 14.9 | Lung (fetal) | 100.0 | 85.3 |
| (hippocampus) | | | | | |
| Brain (substantia | 0.9 | 1.9 | Lung ca. | 0.0 | 0.0 |
| nigra) | | | (small cell) | | |
| | | | LX-1 | | |
| Brain (thalamus) | 0.9 | 4.2 | Lung ca. | 0.4 | 1.6 |
| | | | (small cell) | | |
| | | | NCI-H69 | | |
| Cerebral Cortex | 3.5 | 5.6 | Lung ca. | 0.4 | 0.4 |
| | | | (s.cell var.) | | |
| | | | SHP-77 | | |
| Spinal cord | 4.6 | 3.9 | Lung ca. (large | 0.1 | 0.0 |
| | | | cell) NCI-H460 | | |
| glio/astro | 0.2 | 0.0 | Lung ca. (non- | 6.3 | 1.9 |
| U87-MG | | | sm. cell) A549 | | |
| glio/astro | 1.5 | 2.9 | Lung ca. (non- | 6.2 | 6.3 |
| U-118-MG | | | s.cell) | | |
| | | | NCI-H23 | | |
| astrocytoma | 4.2 | 6.1 | Lung ca. (non- | 6.0 | 8.5 |
| SW1783 | | | s.cell) HOP-62 | | |
| neuro*; met | 0.0 | 0.0 | Lung ca. (non- | 0.1 | 1.2 |
| SK-N-AS | | | s.cl) | | |
| | | | NCI-H522 | | |
| astrocytoma | 0.9 | 0.5 | Lung ca. | 1.9 | 2.7 |
| SF-539 | | | (squam.) SW | | |
| | | | 900 | | |
| astrocytoma | 16.4 | 15.4 | Lung ca. | 2.5 | 3.2 |
| SNB-75 | | | (squam.) | | |
| | | | NCI-H596 | | |
| glioma SNB-19 | 0.4 | 1.2 | Mammary | 33.4 | 43.5 |
| | | | gland | | |
| glioma U251 | 0.6 | 1.1 | Breast ca.* | 0.6 | 0.6 |
| | | | (pl.ef) MCF-7 | | |
| glioma SF-295 | 4.2 | 8.2 | Breast ca.* | 0.0 | 0.1 |
| | | | (pl.ef) MDA- | | |
| | | | MB-231 | | |
| Heart (fetal) | 9.2 | 10.9 | Breast ca.* | 0.0 | 0.1 |
| | | | (pl.ef) T47D | | |
| Heart | 11.3 | 12.9 | Breast ca. | 0.1 | 0.0 |
| | | | BT-549 | | |
| Skeletal muscle | 10.2 | 24.5 | Breast ca. | 0.0 | 0.3 |
| (fetal) | | | MDA-N | | |
| Skeletal muscle | 0.1 | 0.4 | Ovary | 42.0 | 62.4 |
| Bone marrow | 2.1 | 2.2 | Ovarian ca. | 1.4 | 1.3 |
| | | | OVCAR-3 | | |
| Thymus | 2.4 | 3.4 | Ovarian ca. | 0.0 | 0.0 |
| | | | OVCAR-4 | | |
| Spleen | 8.2 | 9.7 | Ovarian ca. | 0.3 | 0.1 |
| | | | OVCAR-5 | | |
| Lymph node | 17.7 | 27.5 | Ovarian ca. | 0.1 | 0.7 |
| | | | OVCAR-8 | | |
| Colorectal | 0.7 | 1.6 | Ovarian ca. | 0.0 | 0.0 |
| | | | IGROV-1 | | |
| Stomach | 4.8 | 10.9 | Ovarian ca.* | 0.0 | 0.0 |
| | | | (ascites) SK- | | |
| | | | OV-3 | | |
| Small intestine | 21.8 | 32.1 | Uterus | 6.3 | 9.1 |
| Colon ca. SW480 | 0.5 | 0.3 | Plancenta | 3.8 | 7.1 |
| Colon ca.* | 0.0 | 0.0 | Prostate | 0.4 | 1.0 |
| SW620(SW480 | | | | | |
| met) | | | | | |
| Colon ca. | 2.1 | 3.3 | Prostate ca.* | 0.0 | 0.3 |
| HT29 | | | (bone met) | | |
| | | | PC-3 | | |
| Colon ca. | 0.3 | 0.0 | Testis | 43.5 | 56.3 |
| HCT-116 | | | | | |
| Colon ca. CaCo-2 | 3.4 | 4.0 | Melanoma | 0.7 | 0.8 |
| | | | Hs688(A).T | | |
| Colon ca. | 0.4 | 0.6 | Melanoma* | 0.1 | 1.2 |
| tissue(ODO3866) | | | (met) | | |
| | | | Hs688(B).T | | |
| Colon ca. | 0.5 | 1.3 | Melanoma | 0.0 | 0.0 |
| HCC-2998 | | | UACC-62 | | |
| Gastric ca.* (liver | 0.0 | 0.3 | Melanoma | 0.0 | 0.0 |
| met) NCI-N87 | | | M14 | | |
| Bladder | 0.1 | 0.4 | Melanoma | 0.1 | 0.2 |
| | | | LOX IMVI | | |
| Trachea | 33.2 | 43.5 | Melanoma* | 0.3 | 0.0 |
| | | | (met) SK- | | |
| | | | MEL-5 | | |
| Kidney | 0.5 | 0.0 | Adipose | 4.7 | 4.2 |

[0894] TABLE 59
Panel 2D

| | Rel. Exp. (%) | Rel. Exp. (%) | | Rel. Exp. (%) | Rel. Exp. (%) |
|---|---|---|---|---|---|
| | Ag1489, Run | Ag1489, Run | | Ag1489, Run | Ag1489, Run |
| Tissue Name | 152799815 | 152799848 | Tissue Name | 152799815 | 152799848 |
| Normal Colon | 24.0 | 17.2 | Kidney | 0.1 | 0.0 |
| | | | Margin | | |
| | | | 8120608 | | |
| CC Well to Mod | 1.4 | 0.4 | Kidney Cancer | 0.0 | 0.0 |
| Diff (ODO3866) | | | 8120613 | | |
| CC Margin | 4.6 | 3.6 | Kidney | 0.1 | 0.1 |
| (ODO3866) | | | Margin | | |
| | | | 8120614 | | |
| CC Gr.2 | 0.4 | 0.7 | Kidney Cancer | 1.1 | 1.0 |
| rectosigmoid | | | 9010320 | | |
| (ODO3868) | | | | | |
| CC Margin | 3.4 | 1.1 | Kidney | 0.1 | 0.2 |
| (ODO3868) | | | Margin | | |
| | | | 9010321 | | |
| CC Mod Diff | 0.0 | 0.1 | Normal Uterus | 3.1 | 2.3 |
| (ODO3920) | | | | | |
| CC Margin | 5.0 | 4.7 | Uterus Cancer | 24.5 | 18.8 |
| (ODO3920) | | | 064011 | | |
| CC Gr.2 ascend | 1.0 | 0.5 | Normal | 10.4 | 9.0 |
| colon | | | Thyroid | | |
| (ODO3921) | | | | | |
| CC Margin | 4.1 | 5.0 | Thyroid | 0.3 | 0.0 |
| (ODO3921) | | | Cancer | | |
| | | | 064010 | | |
| CC from Partial | 2.2 | 0.9 | Thyroid | 0.5 | 0.5 |
| Hepatectomy | | | Cancer | | |
| (ODO4309) | | | A302152 | | |
| Mets | | | | | |
| Liver Margin | 3.2 | 2.0 | Thyroid | 14.5 | 9.2 |
| (ODO4309) | | | Margin | | |
| | | | A302153 | | |
| Colon mets to | 0.4 | 0.7 | Normal Breast | 32.1 | 31.9 |
| lung | | | | | |
| (OD04451-01) | | | | | |
| Lung Margin | 6.0 | 5.2 | Breast Cancer | 0.5 | 0.4 |
| (OD04451-02) | | | (OD04566) | | |
| Normal Prostate | 1.1 | 0.9 | Breast Cancer | 9.3 | 4.4 |
| 6546-1 | | | (OD04590-01) | | |
| Prostate Cancer | 1.4 | 0.6 | Breast Cancer | 9.7 | 5.9 |
| (OD04410) | | | Mets | | |
| | | | (OD04590-03) | | |
| Prostate Margin | 0.2 | 0.7 | Breast Cancer | 8.2 | 5.8 |
| (OD04410) | | | Metastasis | | |
| | | | (OD04655-05) | | |
| Prostate Cancer | 0.9 | 0.6 | Breast Cancer | 8.4 | 5.3 |
| (OD04720-01) | | | 064006 | | |
| Prostate Margin | 1.0 | 1.0 | Breast Cancer | 9.6 | 9.2 |
| (OD04720-02) | | | 1024 | | |
| Normal Lung | 100.0 | 100.0 | Breast Cancer | 1.7 | 2.2 |
| 061010 | | | 9100266 | | |
| Lung Met to | 0.8 | 1.0 | Breast Margin | 10.7 | 9.6 |
| Muscle | | | 9100265 | | |
| (ODO4286) | | | | | |
| Muscle Margin | 2.0 | 1.3 | Breast Cancer | 11.0 | 10.2 |
| (ODO4286) | | | A209073 | | |
| Lung Malignant | 11.1 | 8.4 | Breast Margin | 13.6 | 12.5 |
| Cancer | | | A2090734 | | |
| (OD03126) | | | | | |
| Lung Margin | 64.2 | 51.8 | Normal Liver | 2.2 | 1.9 |
| (OD03126) | | | | | |
| Lung Cancer | 6.6 | 5.1 | Liver Cancer | 0.6 | 0.4 |
| (OD04404) | | | 064003 | | |
| Lung Margin | 37.4 | 31.9 | Liver Cancer | 0.6 | 0.2 |
| (OD04404) | | | 1025 | | |
| Lung Cancer | 1.8 | 1.3 | Liver Cancer | 0.0 | 0.1 |
| (OD04565) | | | 1026 | | |
| Lung Margin | 19.3 | 20.6 | Liver Cancer | 0.9 | 0.3 |
| (OD04565) | | | 6004-T | | |
| Lung Cancer | 2.0 | 2.2 | Liver Tissue | 0.2 | 0.2 |
| (OD04237-01) | | | 6004-N | | |
| Lung Margin | 42.3 | 37.6 | Liver Cancer | 0.0 | 0.2 |
| (OD04237-02) | | | 6005-T | | |
| Ocular Mel Met | 0.0 | 0.2 | Liver Tissue | 0.0 | 0.0 |
| to Liver | | | 6005-N | | |
| (ODO4310) | | | | | |
| Liver Margin | 2.3 | 0.5 | Normal | 2.4 | 0.5 |
| (ODO4310) | | | Bladder | | |
| Melanoma Mets | 1.9 | 1.8 | Bladder | 0.5 | 0.9 |
| to Lung | | | Cancer 1023 | | |
| (OD04321) | | | | | |
| Lung Margin | 49.0 | 37.9 | Bladder | 33.4 | 31.4 |
| (OD04321) | | | Cancer | | |
| | | | A302173 | | |
| Normal Kidney | 5.4 | 4.8 | Bladder | 0.4 | 0.0 |
| | | | Cancer | | |
| | | | (OD04718-01) | | |
| Kidney Ca, | 0.4 | 0.6 | Bladder | 17.4 | 17.6 |
| Nuclear grade 2 | | | Normal | | |
| (OD04338) | | | Adjacent | | |
| | | | (OD04718-03) | | |
| Kidney Margin | 3.2 | 2.1 | Normal Ovary | 22.4 | 14.9 |
| (OD04338) | | | | | |
| Kidney Ca | 0.7 | 0.3 | Ovarian | 7.1 | 4.4 |
| Nuclear grade | | | Cancer | | |
| 1/2 (OD04339) | | | 064008 | | |
| Kidney Margin | 1.2 | 0.2 | Ovarian | 2.1 | 1.8 |
| (OD04339) | | | Cancer | | |
| | | | (OD04768-07) | | |
| Kidney Ca, Clear | 0.4 | 0.4 | Ovary Margin | 1.2 | 1.8 |
| cell type | | | (OD04768-08) | | |
| (OD04340) | | | | | |
| Kidney Margin | 5.1 | 4.2 | Normal | 6.4 | 4.4 |
| (OD04340) | | | Stomach | | |
| Kidney Ca, | 0.3 | 0.1 | Gastric Cancer | 3.1 | 1.4 |
| Nuclear grade 3 | | | 9060358 | | |
| (OD04348) | | | | | |
| Kidney Margin | 2.4 | 1.6 | Stomach | 1.3 | 2.3 |
| (OD04348) | | | Margin | | |
| | | | 9060359 | | |
| Kidney Cancer | 0.1 | 0.2 | Gastric Cancer | 2.4 | 4.5 |
| (OD04622-01) | | | 9060395 | | |
| Kidney Margin | 0.0 | 0.1 | Stomach | 5.3 | 3.4 |
| (OD04622-03) | | | Margin | | |
| | | | 9060394 | | |
| Kidney Cancer | 0.0 | 0.0 | Gastric Cancer | 0.3 | 0.7 |
| (OD04450-01) | | | 9060397 | | |
| Kidney Margin | 1.9 | 1.1 | Stomach | 0.7 | 0.1 |
| (OD04450-03) | | | Margin | | |
| | | | 9060396 | | |
| Kidney Cancer | 0.0 | 0.0 | Gastric Cancer | 6.8 | 4.4 |
| 8120607 | | | 064005 | | |

[0895] TABLE 60
Panel 4.1D

| | Rel. Exp. (%) Ag4335, Run | | Rel. Exp. (%) Ag4335, Run |
|---|---|---|---|
| Tissue Name | 184793354 | Tissue Name | 184793354 |
| Secondary Th1 act | 0.0 | HUVEC IL-1beta | 0.0 |
| Secondary Th2 act | 0.0 | HUVEC IFN gamma | 0.9 |
| Secondary Tr1 act | 0.0 | HUVEC TNF alpha + IFN | 0.0 |
| | | gamma | |
| Secondary Th1 rest | 0.0 | HUVEC TNF alpha + IL4 | 0.5 |
| Secondary Th2 rest | 0.0 | HUVEC IL-11 | 0.0 |
| Secondary Tr1 rest | 0.0 | Lung Microvasular EC | 1.1 |
| | | none | |
| Primary Th1 act | 0.0 | Lung Microvascular EC | 0.0 |
| | | TNFalpha + IL-1beta | |
| Primary Th2 act | 0.0 | Microvascular Dermal EC | 0.0 |
| | | none | |
| Primary Tr1 act | 0.0 | Microvascular Dermal EC | 0.0 |
| | | TNFalpha + IL-1beta | |
| Primary Th1 rest | 0.0 | Bronchial epithelium | 0.0 |
| | | TNFalpha + IL1beta | |
| Primary Th2 rest | 0.0 | Small airway epithelium | 0.6 |
| | | none | |
| Primary Tr1 rest | 0.0 | Small airway epithelium | 0.7 |
| | | TNFalpha + IL-1beta | |
| CD45RA CD4 | 0.6 | Coroney artery SMC rest | 1.9 |
| lymphocyte act | | | |
| CD45RO CD4 | 0.0 | Coronery artery SMC | 1.6 |
| lymphocyte act | | TNFalpha + IL-1beta | |
| CD8 lymphocyte act | 0.0 | Astrocytes rest | 0.0 |
| Secondary CD8 | 1.2 | Astrocytes TNFalpha + | 0.0 |
| lymphocyte rest | | IL-1beta | |
| Secondary CD8 | 0.0 | KU-812 (Basophil) rest | 48.6 |
| lymphocyte act | | | |
| CD4 lymphocyte none | 0.0 | KU-812 (Basophil) | 26.1 |
| | | PMA/ionomycin | |
| 2ry Th1/Th2/Tr1_anti- | 0.0 | CCD1106 (Keratinocytes) | 0.0 |
| CD95 CH11 | | none | |
| LAK cells rest | 1.5 | CCD1106 (Keratinocytes) | 0.0 |
| | | TNFalpha + IL-1beta | |
| LAK cells IL-2 | 0.0 | Liver cirrhosis | 6.0 |
| LAK cells IL-2 + IL-12 | 0.0 | NCI-H292 none | 0.7 |
| LAK cells IL-2 + IFN | 0.0 | NCI-H292 IL-4 | 0.0 |
| gamma | | | |
| LAK cells IL-2 + IL-18 | 0.9 | NCI-H292 IL-9 | 0.7 |
| LAK cells | 0.0 | NCI-H292 IL-13 | 0.4 |
| PMA/ionomycin | | | |
| NK cells IL-2 rest | 0.3 | NCI-H292 IFN gamma | 1.7 |
| Two Way MLR 3 day | 1.7 | HPAEC none | 0.0 |
| Two Way MLR 5 day | 0.5 | HPAEC TNF alpha + IL-1 | 0.0 |
| | | beta | |
| Two Way MLR 7 day | 0.0 | Lung fibroblast none | 26.8 |
| PBMC rest | 0.0 | Lung fibroblast TNF alpha + | 2.0 |
| | | IL-1 beta | |
| PBMC PWM | 0.5 | Lung fibroblast IL-4 | 20.3 |
| PBMC PHA-L | 0.0 | Lung fibroblast IL-9 | 26.2 |
| Ramos (B cell) none | 0.7 | Lung fibroblast IL-13 | 37.4 |
| Ramos (B cell) | 0.0 | Lung fibroblast IFN | 44.1 |
| ionomycin | | gamma | |
| B lymphocytes PWM | 0.0 | Dermal fibroblast | 3.0 |
| | | CCD1070 rest | |
| B lymphocytes CD40L | 0.8 | Dermal fibroblast | 0.7 |
| and IL-4 | | CCD1070 TNF alpha | |
| EOL-1 dbcAMP | 34.2 | Dermal fibroblast | 2.2 |
| | | CCD1070 IL-1 beta | |
| EOL-1 dbcAMP | 18.6 | Dermal fibroblast IFN | 12.8 |
| PMA/ionomycin | | gamma | |
| Dendritic cells none | 11.9 | Dermal fibroblast IL-4 | 48.3 |
| Dendritic cells LPS | 0.7 | Dermal Fibroblasts rest | 17.9 |
| Dendritic cells anti- | 2.7 | Neutrophils TNFa + LPS | 0.0 |
| CD40 | | | |
| Monocytes rest | 1.4 | Neutrophils rest | 0.7 |
| Monocytes LPS | 0.0 | Colon | 10.7 |
| Macrophages rest | 2.8 | Lung | 100.0 |
| Macrophages LPS | 1.1 | Thymus | 27.9 |
| HUVEC none | 0.0 | Kidney | 10.0 |
| HUVEC starved | 0.0 | | |

[0896] TABLE 61
Panel 4D

| | Rel. Exp. (%) | Rel. Exp. (%) | Rel. Exp. (%) | | Rel. Exp. (%) | Rel. Exp. (%) | Rel. Exp. (%) |
|---|---|---|---|---|---|---|---|
| | Ag1489, Run | Ag1489, Run | Ag1489, Run | | Ag1489, Run | Ag1489, Run | Ag1489, Run |
| Tissue Name | 142272577 | 144378640 | 144575346 | Tissue Name | 142272577 | 144378640 | 144575346 |
| Secondary Th1 | 0.0 | 0.5 | 0.0 | HUVEC IL- | 0.0 | 0.3 | 0.0 |
| act | | | | 1beta | | | |
| Secondary Th2 | 0.0 | 0.0 | 0.8 | HUVEC IFN | 0.0 | 0.0 | 0.4 |
| act | | | | gamma | | | |
| Secondary Tr1 | 1.0 | 0.0 | 0.6 | HUVEC TNF | 0.0 | 0.0 | 0.0 |
| act | | | | alpha + IFN | | | |
| | | | | gamma | | | |
| Secondary Th1 | 0.0 | 0.0 | 0.0 | HUVEC TNF | 0.0 | 0.0 | 0.0 |
| rest | | | | alpha + IL4 | | | |
| Secondary Th2 | 0.0 | 0.0 | 0.0 | HUVEC IL-11 | 0.0 | 3.6 | 0.0 |
| rest | | | | | | | |
| Secondary Tr1 | 0.0 | 0.0 | 0.0 | Lung | 0.6 | 0.5 | 0.4 |
| rest | | | | Microvascular | | | |
| | | | | EC none | | | |
| Primary Th1 act | 0.3 | 0.0 | 3.4 | Lung | 0.0 | 0.0 | 0.0 |
| | | | | Microvascular | | | |
| | | | | EC TNFalpha | | | |
| | | | | + IL-1beta | | | |
| Primary Th2 act | 1.3 | 1.1 | 0.0 | Microvascular | 1.7 | 0.0 | 0.0 |
| | | | | Dermal EC | | | |
| | | | | none | | | |
| Primary Tr1 act | 0.4 | 1.9 | 2.2 | Microsvasular | 0.0 | 0.0 | 0.0 |
| | | | | Dermal EC | | | |
| | | | | TNFalpha + | | | |
| | | | | IL-1beta | | | |
| Primary Th1 | 0.6 | 0.4 | 0.0 | Bronchial | 0.0 | 0.7 | 0.0 |
| rest | | | | epithelium | | | |
| | | | | TNFalpha + | | | |
| | | | | IL1beta | | | |
| Primary Th2 | 0.0 | 0.0 | 0.0 | Small airway | 0.0 | 0.0 | 0.0 |
| rest | | | | epithelium | | | |
| | | | | none | | | |
| Primary Tr1 rest | 0.0 | 0.0 | 0.9 | Small airway | 0.0 | 0.0 | 0.0 |
| | | | | epithelium | | | |
| | | | | TNFalpha + | | | |
| | | | | IL-1beta | | | |
| CD45RA CD4 | 0.0 | 0.5 | 0.5 | Coronery | 5.9 | 0.9 | 2.0 |
| lymphocyte act | | | | artery SMC | | | |
| | | | | rest | | | |
| CD45RO CD4 | 0.4 | 0.5 | 0.9 | Coronery | 1.0 | 0.3 | 0.0 |
| lymphocyte act | | | | artery SMC | | | |
| | | | | TNFalpha + | | | |
| | | | | IL-1beta | | | |
| CD8 | 0.6 | 0.0 | 0.0 | Astrocytes rest | 0.6 | 0.0 | 0.4 |
| lymphocyte act | | | | | | | |
| Secondary CD8 | 0.0 | 0.5 | 0.4 | Astrocytes | 0.5 | 0.0 | 0.4 |
| lymphocyte rest | | | | TNFalpha + | | | |
| | | | | IL-1beta | | | |
| Secondary CD8 | 0.0 | 0.5 | 0.0 | KU-812 | 36.6 | 26.4 | 25.9 |
| lymphocyte act | | | | (Basophil) rest | | | |
| CD4 | 1.1 | 0.0 | 0.0 | KU-812 | 33.9 | 16.7 | 24.5 |
| lymphocyte | | | | (Basophil) | | | |
| none | | | | PMA/ | | | |
| | | | | ionomycin | | | |
| 2ry | 0.6 | 1.9 | 0.0 | CCD1106 | 0.0 | 0.0 | 0.5 |
| Th1/Th2/Tr1 | | | | (Keratinocytes) | | | |
| anti-CD95 CH11 | | | | none | | | |
| LAK cells rest | 1.4 | 0.5 | 0.6 | CCD1106 | 0.5 | 0.0 | 0.4 |
| | | | | (Keratinocytes) | | | |
| | | | | TNFalpha + | | | |
| | | | | IL-1beta | | | |
| LAK cells IL-2 | 0.0 | 0.4 | 0.0 | Liver cirrhosis | 5.8 | 2.2 | 3.4 |
| LAK cells IL-2 + | 0.0 | 0.0 | 0.4 | Lupus kidney | 4.2 | 3.3 | 4.0 |
| IL-12 | | | | | | | |
| LAK cells IL-2 + | 0.0 | 0.5 | 0.0 | NCI-H292 | 1.2 | 1.4 | 2.9 |
| IFN gamma | | | | none | | | |
| LAK cells IL-2 + | 1.0 | 0.0 | 0.7 | NCI-H292 IL-4 | 1.5 | 0.4 | 1.3 |
| IL-18 | | | | | | | |
| LAK cells | 0.0 | 0.4 | 4.5 | NCI-H292 IL-9 | 0.5 | 2.0 | 0.4 |
| PMA/ionomycin | | | | | | | |
| NK Cells IL-2 | 0.5 | 0.5 | 0.0 | NCI-H292 IL- | 0.9 | 0.0 | 0.9 |
| rest | | | | 13 | | | |
| Two Way MLR | 1.1 | 1.9 | 1.0 | NCI-H292 | 2.2 | 0.3 | 1.2 |
| 3 day | | | | IFN gamma | | | |
| Two Way MLR | 0.0 | 1.4 | 0.0 | HPAEC none | 0.0 | 0.0 | 0.0 |
| 5 day | | | | | | | |
| Two Way MLR | 0.0 | 0.0 | 0.0 | HPAEC TNF | 0.0 | 0.9 | 0.0 |
| 7 day | | | | alpha +IL-1 | | | |
| | | | | beta | | | |
| PBMC rest | 0.0 | 0.0 | 0.5 | Lung | 22.4 | 9.4 | 7.7 |
| | | | | fibroblast | | | |
| | | | | none | | | |
| PBMC PWM | 3.1 | 4.4 | 1.7 | Lung | 0.5 | 0.0 | 0.5 |
| | | | | fibroblast TNF | | | |
| | | | | alpha + IL-1 | | | |
| | | | | beta | | | |
| PBMC PHA-L | 0.6 | 1.0 | 0.5 | Lung | 33.0 | 31.4 | 29.7 |
| | | | | fibroblast IL-4 | | | |
| Ramos (B cell) | 6.2 | 5.3 | 3.2 | Lung | 6.7 | 8.7 | 19.3 |
| none | | | | fibroblast IL-9 | | | |
| Ramos (B cell) | 8.0 | 10.4 | 11.3 | Lung | 100.0 | 48.6 | 51.8 |
| ionomycin | | | | fibroblast | | | |
| | | | | IL-13 | | | |
| B lymphocytes | 3.4 | 2.4 | 3.0 | Lung | 50.0 | 39.5 | 47.0 |
| PWM | | | | fibroblast IFN | | | |
| | | | | gamma | | | |
| B lymphocytes | 2.4 | 3.4 | 2.4 | Dermal | 2.8 | 2.2 | 1.9 |
| CD40L and IL-4 | | | | fibroblast | | | |
| | | | | CCD1070 rest | | | |
| EOL-1 dbcAMP | 19.2 | 13.0 | 21.2 | Dermal | 1.5 | 2.2 | 2.9 |
| | | | | fibroblast | | | |
| | | | | CCD1070 | | | |
| | | | | TNF alpha | | | |
| EOL-1 dbcAMP | 8.4 | 6.5 | 6.7 | Dermal | 0.0 | 1.7 | 1.5 |
| PMA/ionomycin | | | | fibroblast | | | |
| | | | | CCD1070 IL- | | | |
| | | | | 1 beta | | | |
| Dendritic cells | 3.8 | 2.9 | 5.9 | Dermal | 6.1 | 4.5 | 3.0 |
| none | | | | fibroblast IFN | | | |
| | | | | gamma | | | |
| Dendritic cells | 0.0 | 0.0 | 0.0 | Dermal | 33.2 | 27.5 | 25.5 |
| LPS | | | | fibroblast IL-4 | | | |
| Dendritic cells | 4.2 | 2.0 | 3.9 | IBD Colitis 2 | 0.6 | 1.0 | 1.6 |
| anti-CD40 | | | | | | | |
| Monocytes rest | 1.8 | 0.4 | 0.9 | IBD Crohn's | 11.8 | 10.0 | 6.1 |
| Monocytes LPS | 0.0 | 0.0 | 0.0 | Colon | 25.9 | 27.7 | 24.5 |
| Macrophages | 1.0 | 0.0 | 0.8 | Lung | 92.0 | 100.0 | 100.0 |
| rest | | | | | | | |
| Macrophages | 1.7 | 0.4 | 1.3 | Thymus | 21.9 | 16.7 | 18.3 |
| LPS | | | | | | | |
| HUVEC none | 0.0 | 0.4 | 0.0 | Kidney | 30.8 | 18.9 | 13.1 |
| HUVEC starved | 0.4 | 0.4 | 0.6 | | | | |

[0897] AI_comprehensive panel_v1.0 Summary: Ag1489 Expression of the NOV12 transcript is induced in most rheumatoid arthritis (RA) tissues and in synovium and bone tissues in osteoarthritis (OA) patients. It is also highly expressed in normal lung in 2 out of 3 normal lungs in this panel and in panels 1.1, 1.2, 1.3, 4 and 4.1. In addition, the expression in diseased lung is reduced or absent. These data suggest that lung expression of the protein encoded for by this transcript may serve an important function that is lost in disease states, but that OA/RA promotes the expression of this gene in the joint. Therefore, therapies designed with the protein encoded by this transcript may be important for the treament of OA/RA and lung diseases such as chronic pulmonary obstructive disease, emphysema, allergy and asthma.

[0898] CNS_neurodegeneration_v1.0 Summary: Ag4335 The NOV12 gene is not expressed differentially in Alzheimer's disease. However, widespread expression of this gene in the brain suggests a role for the gene product in CNS processes. Therapeutic modulation of the expression or function of this protein may be useful in the treatment of neurological disorders and stroke. A second experiment with Ag3032 showed low/undetectable expression in all samples on this panel (CTs>35). (Data not shown.)

[0899] General_screening_panel_v1.4 Summary: Ag4335 Highest expression of the NOV12 gene is seen in fetal lung (CT=25.4), with overall expression associated with normal tissues. Furthermore, expression of this gene is higher in fetal lung when compared to expression in adult lung (CT=29) and in fetal skeletal muscle (CT=29) when compared to adult skeletal muscle (CT=33). Thus, this gene product may be involved in the development and homeostasis of these organs. Therapeutic modulation of the expression or function of this gene may maintain or restore function to lung and skeletal muscle affected by disease.

[0900] This gene is also expressed in a variety of metabolic tissues including adipose, adult and fetal liver, adult and fetal heart, pituitary, thyroid and pancreas. This expression profile suggests that this gene product could potentially be used to treat metabolic disorders, including obesity and diabetes.

[0901] This gene shows widespread moderate expression in the brain. This result is in concordance with CNS_neurodegeneration_V1.0. Please see that panel for discussion of potential utility in the central nervous system.

[0902] Panel 1 Summary: Ag317 Highest expression of the NOV12 gene is seen in the testis (CT=26.6). There is also substantial expression seen in fetal lung tissue (CT=28), especially when compared to expression in adult lung (CT=40). This result is in concordance with the results from Panel General_screening_panel_v1.4, as is association of expression with normal tissue. Thus, this gene product may be involved in the development and homeostasis of the lung. Therapeutic modulation of the expression or function of this gene may maintain or restore function to lung affected by disease.

[0903] As in General_screening_panel_v1.4, this gene is moderately expressed in adipose, heart, pituitary, thyroid and pancreas. Thus, this gene product may be important for the pathogenesis, diagnosis, and/or treatment of metabolic disease, including Types 1 and 2 diabetes, and obesity. In addition, this gene appears to be differentially expressed in adult (CT value=34) versus fetal liver (CT value=40) and may be useful for the identification of the fetal vs adult source of this tissue.

[0904] As in the preceding panels, this gene is also widely expressed in the brain. Please see that panel for discussion of potential utility in the central nervous system.

[0905] Panel 1.1 Summary: Ag674 Highest expression of the NOV12 gene is in the heart (CT=27.4). This gene is also moderately expressed in a variety of other metabolic tissues including adult and fetal liver, fetal heart, adult and fetal skeletal muscle, adrenal, pituitary, thyroid and pancreas. Thus, this gene product may be important for the pathogenesis, diagnosis, and/or treatment of metabolic disease, including Types 1 and 2 diabetes, and obesity.

[0906] There is also substantial expression in samples derived from mammary gland, salivary gland, testis, and a number of lung derived samples, a preference seen in previous panel results. Thus, the expression of this gene could be used to distinguish these samples from other samples in the panel. Moreover, therapeutic modulation of this gene product, through the use of small molecule drugs, antibodies or protein therapeutics might be of benefit in the treatment of lung cancer.

[0907] As in the preceding panels, this gene is also widely expressed in the brain. Please see that panel for discussion of potential utility in the central nervous system.

[0908] Panel 1.2 Summary: Ag1489/Ag674 The expression of the NOV12 gene was analysed in two independent runs on panel 1.2 with two different probe/primer pairs. The data is somewhat discordant which may reflect size and/or post-transcriptional processing of this gene. The expression of the gene appeared to be highest in testis tissue in one run and heart tissue in the other run. In addition there is substantial expression associated with salivary gland, adrenal gland, lung tissue, small intestine and mammary gland. Thus, the expression of this gene could be used to distinguish these tissues from other tissues in the panel.

[0909] This gene is also moderately expressed in a variety of metabolic tissues including adult and fetal liver, adult and fetal heart, adrenal, pituitary, thyroid and pancreas. Thus, this gene product may be important for the pathogenesis, diagnosis, and/or treatment of metabolic disease, including Types 1 and 2 diabetes, and obesity.

[0910] As in the previous panels, this gene is also widely expressed in the brain. Please see that panel for discussion of potential utility in the central nervous system.

[0911] Panel 1.3D Summary: Ag1489 Two experiments with the same probe and primer set show excellent concordance. The expression of the NOV12 gene appears to be highest in a sample derived from normal fetal and adult lung tissue. This association with lung is evident in the preceding panels as well. In addition, there is substantial expression in normal ovary, testis, mammary gland and trachea. Thus, the expression of this gene could be used to distinguish these tissues from other tissues in the panel. Overall, the gene shows association with normal tissues, as seen in previous panels.

[0912] There is also significant association with tissues of metabolic relevance, including pancreas, adrenal, thyroid, pituitary, adult and fetal heart, adult and fetal liver, and adipose. Thus, this gene product may be important for the pathogenesis, diagnosis, and/or treatment of metabolic disease, including Types 1 and 2 diabetes, and obesity.

[0913] This gene product appears to be differentially expressed in fetal (CTs=29-30) vs adult (CTs=35-37) skeletal muscle and may be useful for the identification of the adult vs fetal source of this tissue. Furthermore, the higher levels of expression of this gene in the fetal tissue suggest that this gene product may be involved in the development and homeostasis of the skeletal muscle. Therapeutic modulation of the expression or function of this gene may maintain or restore function to weak or dystrophic muscle.

[0914] As in the previous panels, this gene is also widely expressed in the brain. Please see that panel for discussion of potential utility in the central nervous system. A third experiment with Ag3032 showed low/undetectable expression in all samples on this panel (CTs>35). (Data not shown.) The amp plot indicates that there is a high probability of a probe failure.

[0915] Panel 2D Summary: Ag1489 The expression of the NOV12 gene was analyzed in two independent runs in panel 2D with excellent concordance between the runs. The expression of this gene appears to be highest in a sample of normal lung tissue, in agreement with previous results. In addition, there is substantial expression in all of the normal lung tissue samples adjacent to samples derived from lung cancer. Expression in the lung cancers appears to be virtually absent. Thus, the expression of this gene could be used to distinguish normal lung tissue from malignant lung tissue. Moreover, therapeutic modulation of this gene product, through the use of small molecule drugs, antibodies or protein therapeutics might be of benefit in the treatment of lung cancer.

[0916] Panel 4.1D and Panel 4D Summary: Ag4335/Ag1489 Multiple experiments show that the NOV12 gene is expressed in the lung, lung fibroblasts, EOL-1 cells and KU-812 cells. Expression of the transcript is downregulated by TNFalpha and IL-1 beta in lung fibroblasts. Based on the expression profile in this panel as well as that in the A/I panel, therapeutics designed with this protein could be important in the treatment of chronic obstructive pulmonary disease, emphysema, allergy and asthma. One experiment with Ag3032 showed low/undetectable expression in all samples on this panel (CTs>35). (Data not shown.) The amp plot indicates that there is a high probability of a probe failure.

[0917] NOV11a

[0918] Expression of gene NOV11a was assessed using the primer-probe sets Ag2313 and Ag401, described in Tables 62 and 63. Results of the RTQ-PCR runs are shown in Tables 64, 65, 66, 67, 68 and 69.

TABLE 62

Probe Name Ag2313

| Primers | Sequences | Length | Start Position | SEQ ID NO: |
|---|---|---|---|---|
| Forward | 5′tatcttgatgatggccattca-3′ | 21 | 2631 | 214 |
| Probe | TET-5′-tccaatacctccaccagaagcaattt-3′-TAMRA | 26 | 2653 | 215 |
| Reverse | 5′-caccagaacactggaacagaat-3′ | 22 | 2696 | 216 |

[0919] TABLE 63

Probe Name Ag401

| | | | | |
|---|---|---|---|---|
| Primers | Sequences | Length | Start Position | SEQ ID NO: |

| | | | | |
|---|---|---|---|---|
| Forward | 5′-ttgtgccaaaacatccatcct-3′ | 21 | 2855 | 217 |
| Probe | TET-5′-agcctggagaagctctcactcaacattgc-3′-TAMRA | 29 | 2877 | 218 |
| Reverse | 5′-tatgatgcggacctcccagt-3′ | 20 | 2911 | 219 |

[0920] TABLE 64
AI_comprehensive panel_v1.0

| | Rel. Exp. (%) Ag2313, Run | | Rel. Exp. (%) Ag2313, Run |
|---|---|---|---|
| Tissue Name | 225147624 | Tissue Name | 225147624 |
| 110967 COPD-F | 23.5 | 112427 Match Control | 100.0 |
| | | Psoriasis-F | |
| 110980 COPD-F | 0.5 | 112418 Psoriasis-M | 25.0 |
| 110968 COPD-M | 24.5 | 112723 Match Control | 14.7 |
| | | Psoriasis-M | |
| 110977 COPD-M | 63.3 | 112419 Psoriasis-M | 31.0 |
| 110989 Emphysema-F | 46.7 | 112424 Match Control | 20.9 |
| | | Psoriasis-M | |
| 110992 Emphysema-F | 12.1 | 112420 Psoriasis-M | 88.3 |
| 110993 Emphysema-F | 26.6 | 112425 Match Control | 78.5 |
| | | Psoriasis-M | |
| 110994 Emphysema-F | 13.7 | 104689 (MF) OA | 45.1 |
| | | Bone-Backus | |
| 110995 Emphysema-F | 37.6 | 104690 (MF) Adj | 32.8 |
| | | “Normal” Bone-Backus | |
| 110996 Emphysema-F | 6.8 | 104691 (MF) OA | 40.1 |
| | | Synovium-Backus | |
| 110997 Asthma-M | 6.7 | 104692 (BA) OA | 25.7 |
| | | Cartilage-Backus | |
| 111001 Astham-F | 38.2 | 104694 (BA) OA | 42.6 |
| | | Bone-Backus | |
| 111002 Asthma-F | 24.0 | 104695 (BA) Adj | 27.7 |
| | | “Normal” Bone-Backus | |
| 111003 Atopic | 28.5 | 104696 (BA) OA | 25.2 |
| Asthma-F | | Synovium-Backus | |
| 111004 Atopic | 27.7 | 104700 (SS) OA Bone- | 23.5 |
| Asthma-F | | Backus | |
| 111005 Atopic | 24.3 | 104701 (SS) Adj | 23.3 |
| Asthma-F | | “Normal” Bone-Backus | |
| 111006 Atopic | 5.3 | 104702 (SS) OA | 48.6 |
| Asthma-F | | Synovium-Backus | |
| 111417 Allergy-M | 17.7 | 117093 OA Cartilage | 31.0 |
| | | Rep7 | |
| 112347 Allergy-M | 0.0 | 112672 OA Bone5 | 74.7 |
| 112349 Normal Lung-F | 0.0 | 112673 OA Synovium5 | 31.9 |
| 112357 Normal Lung-F | 55.1 | 112674 OA Synovial | 40.1 |
| | | Fluid cells5 | |
| 112354 Normal Lung-M | 37.9 | 117100 OA Cartilage | 9.3 |
| | | Rep14 | |
| 112374 Crohns-F | 32.5 | 112756 OA Bone9 | 11.5 |
| 112389 Match | 22.8 | 112757 OA Synovium9 | 45.1 |
| Control Crohns-F | | | |
| 112375 Crohns-F | 22.8 | 112758 OA Synovial | 28.9 |
| | | Fluid Cells9 | |
| 112732 Match | 26.1 | 117125 RA Cartilage | 26.6 |
| Control Crohns-F | | Rep2 | |
| 112725 Crohns-M | 10.4 | 113492 Bone2 RA | 36.1 |
| 112387 Match | 27.7 | 113493 Synovium2 RA | 18.7 |
| Control Crohns-M | | | |
| 112378 Crohns-M | 0.0 | 113494 Syn Fluid Cells | 33.0 |
| | | RA | |
| 112390 Match | 99.3 | 113499 Cartilage4 RA | 44.4 |
| Control Crohns-M | | | |
| 112726 Crohns-M | 23.8 | 113500 Bone4 RA | 61.6 |
| 112731 Match | 29.3 | 113501 Synovium4 RA | 38.7 |
| Control Crohns-M | | | |
| 112380 Ulcer Col-F | 29.9 | 113502 Syn Fluid | 19.6 |
| | | Cells4 RA | |
| 112734 Match | 84.1 | 113495 Cartilage3 RA | 30.8 |
| Control Ulcer Col-F | | | |
| 112384 Ulcer Col-F | 64.2 | 113496 Bone3 RA | 35.4 |
| 112737 Match | 14.1 | 113497 Synovium3 RA | 20.7 |
| Control Ulcer Col-F | | | |
| 112386 Ulcer Col-F | 23.5 | 113498 Syn Fluid | 34.6 |
| | | Cells3 RA | |
| 112738 Match | 11.0 | 117106 Normal | 10.2 |
| Control Ulcer Col-F | | Cartilage Rep20 | |
| 112381 Ulcer Col-M | 1.0 | 113663 Bone3 Normal | 1.0 |
| 112735 Match | 25.0 | 113664 Synovium3 | 0.0 |
| Control Ulcer Col-M | | Normal | |
| 112382 Ulcer Col-M | 29.1 | 113665 Syn Fluid | 0.6 |
| | | Cells3 Normal | |
| 112394 Match | 12.6 | 117107 Normal | 18.6 |
| Control Ulcer Col-M | | Cartilage Rep22 | |
| 112383 Ulcer Col-M | 35.8 | 113667 Bone4 Normal | 21.0 |
| 112736 Match | 12.4 | 113668 Synovium4 | 23.7 |
| Control Ulcer Col-M | | Normal | |
| 112423 Psoriasis-F | 28.5 | 113669 Syn Fluid | 31.4 |
| | | Cells4 Normal | |

[0921] TABLE 65
CNS_neurodegeneration_v1.0

| | Rel. Exp. (%) Ag2313, | | Rel. Exp. (%) Ag2313, |
|---|---|---|---|
| Tissue Name | Run 206262287 | Tissue Name | Run 206262287 |
| AD 1 Hippo | 10.2 | Control (Path) 3 | 4.6 |
| | | Temporal Ctx | |
| AD 2 Hippo | 19.5 | Control (Path) 4 | 28.3 |
| | | Temporal Ctx | |
| AD 3 Hippo | 7.6 | AD 1 Occipital Ctx | 18.4 |
| AD 4 Hippo | 6.3 | AD 2 Occipital Ctx | 0.0 |
| | | (Missing) | |
| AD 5 hippo | 68.8 | AD 3 Occipital Ctx | 9.0 |
| AD 6 Hippo | 46.3 | AD 4 Occipital Ctx | 22.8 |
| Control 2 Hippo | 23.5 | AD 5 Occipital Ctx | 18.9 |
| Control 4 Hippo | 18.2 | AD 6 Occipital Ctx | 25.3 |
| Control (Path) 3 | 11.0 | Control 1 Occipital | 3.5 |
| Hippo | | Ctx | |
| AD 1 Temporal Ctx | 23.7 | Control 2 Occipital | 41.8 |
| | | Ctx | |
| AD 2 Temporal Ctx | 24.1 | Control 3 Occipital | 8.2 |
| | | Ctx | |
| AD 3 Temporal Ctx | 10.2 | Control 4 Occipital | 5.8 |
| | | Ctx | |
| AD 4 Temporal Ctx | 34.9 | Control (Path) 1 | 62.4 |
| | | Occipital Ctx | |
| AD 5 Inf Temporal | 100.0 | Control (Path) 2 | 13.0 |
| Ctx | | Occipital Ctx | |
| AD 5 Sup Temporal | 48.0 | Control (Path) 3 | 4.4 |
| Ctx | | Occipital Ctx | |
| AD 6 Inf Temporal | 66.9 | Control (Path) 4 | 12.8 |
| Ctx | | Occipital Ctx | |
| AD 6 Sup Temporal | 66.4 | Control 1 Parietal | 8.7 |
| Ctx | | Ctx | |
| Control 1 Temporal | 5.7 | Control 2 Parietal | 42.9 |
| Ctx | | Ctx | |
| Control 2 Temporal | 31.9 | Control 3 Parietal | 10.9 |
| Ctx | | Ctx | |
| Control 3 Temporal | 9.5 | Control (Path) 1 | 53.2 |
| Ctx | | Parietal Ctx | |
| Control 4 Temporal | 10.2 | Control (Path) 2 | 27.4 |
| Ctx | | Parietal Ctx | |
| Control (Path) 1 | 39.5 | Control (Path) 3 | 4.6 |
| Temporal Ctx | | Parietal Ctx | |
| Control (Path) 2 | 37.1 | Control (Path) 4 | 37.1 |
| Temporal Ctx | | Parietal Ctx | |

[0922] TABLE 66
Panel 1

| | Rel. Exp. (%) Ag401, | | Rel. Exp. (%) Ag401, |
|---|---|---|---|
| Tissue Name | Run 88225002 | Tissue Name | Run 88225002 |
| Endothelial cells | 1.5 | Renal ca. 786-0 | 10.7 |
| Endothelial cells | 2.5 | Renal ca. A498 | 4.2 |
| (treated) | | | |
| Pancreas | 11.0 | Renal ca. RXF 393 | 4.8 |
| Pancreatic ca. CAPAN 2 | 2.6 | Renal ca. ACHN | 4.9 |
| Adrenal gland | 8.5 | Renal ca. UO-31 | 3.8 |
| Thyroid | 13.6 | Renal ca. TK-10 | 5.0 |
| Salivary gland | 12.7 | Liver | 24.0 |
| Pituitary gland | 8.3 | Liver (fetal) | 4.0 |
| Brain (fetal) | 4.2 | Liver ca. (hepatoblast) | 7.1 |
| | | HepG2 | |
| Brain (whole) | 14.7 | Lung | 3.1 |
| Brain (amygdala) | 4.1 | Lung (fetal) | 12.9 |
| Brain (cerebellum) | 74.2 | Lung ca. (small cell) | 9.5 |
| | | LX-1 | |
| Brain (hippocampus) | 7.4 | Lung ca. (small cell) | 0.8 |
| | | NCI-H69 | |
| Brain (substantia nigra) | 13.6 | Lung ca. (s.cell var.) | 13.2 |
| | | SHP-77 | |
| Brain (thalamus) | 7.3 | Lung ca. (large | 8.5 |
| | | cell)NCI-H460 | |
| Brain (hypothalamus) | 12.6 | Lung ca. (non-sm. | 4.3 |
| | | cell) A549 | |
| Spinal cord | 12.9 | Lung ca. (non-s.cell) | 5.7 |
| | | NCI-H23 | |
| glio/astro U87-MG | 3.5 | Lung ca. (non-s.cl) | 3.7 |
| | | HOP-62 | |
| glio/astro U-118-MG | 7.6 | Lung ca. (non-s.cl) | 10.9 |
| | | NCI-H522 | |
| astrocytoma SW1783 | 2.0 | Lung ca. (squam.) SW | 8.4 |
| | | 900 | |
| neuro*; met SK-N-AS | 4.4 | Lung ca. (squam.) | 1.2 |
| | | NCI-H596 | |
| astrocytoma SF-539 | 5.6 | Mammary gland | 32.1 |
| astrocytoma SNB-75 | 5.4 | Breast ca.* (pl.ef) | 5.6 |
| | | MCF-7 | |
| glioma SNB-19 | 7.0 | Breast ca.* (pl.ef) | 3.3 |
| | | MDA-MB-231 | |
| glioma U251 | 5.5 | Breast ca.* (pl.ef) | 12.3 |
| | | T47D | |
| glioma SF-295 | 5.3 | Breast ca. BT-549 | 6.7 |
| Heart | 8.8 | Breast ca. MDA-N | 8.8 |
| Skeletal muscle | 14.6 | Ovary | 10.4 |
| Bone marrow | 9.3 | Ovarian ca. OVCAR-3 | 3.1 |
| Thymus | 27.7 | Ovarian ca. OVCAR-4 | 1.4 |
| Spleen | 14.6 | Ovarian ca. OVCAR-5 | 12.6 |
| Lymph node | 21.6 | Ovarian ca. OVCAR-8 | 3.4 |
| Colon (ascending) | 13.7 | Ovarian ca. IGROV-1 | 3.2 |
| Stomach | 20.4 | Ovarian ca. (ascites) | 8.3 |
| | | SK-OV-3 | |
| Small intestine | 17.4 | Uterus | 16.7 |
| Colon ca. SW480 | 1.5 | Placenta | 11.2 |
| Colon ca.* SW620 | 4.2 | Prostate | 12.4 |
| (SW480 met) | | | |
| Colon ca. HT29 | 1.5 | Prostate ca.* (bone | 13.1 |
| | | met) PC-3 | |
| Colon Ca. HCT-116 | 5.3 | Testis | 100.0 |
| Colon ca. CaCo-2 | 3.5 | Melanoma | 12.4 |
| | | Hs688(A).T | |
| Colon ca. HCT-15 | 7.2 | Melanoma* (met) | 6.4 |
| | | Hs688(B).T | |
| Colon ca. HCC-2998 | 6.4 | Melanoma UACC-62 | 1.6 |
| Gastric ca.* (liver met) | 26.1 | Melanoma M14 | 33.9 |
| NCI-N87 | | | |
| Bladder | 4.3 | Melanoma LOX | 8.0 |
| | | IMVI | |
| Trachea | 20.9 | Melanoma* (met) SK- | 3.0 |
| | | MEL-5 | |
| Kidney | 14.9 | Melanoma SK-MEL- | 15.9 |
| | | 28 | |
| Kidney (fetal) | 17.3 | | |

[0923] TABLE 67
Panel 1.3D

| | Rel. Exp. (%) | Rel. Exp. (%) | | Rel. Exp. (%) | Rel. Exp. (%) |
|---|---|---|---|---|---|
| | Ag2313, Run | Ag401, Run | | Ag2313, Run | Ag401, Run |
| Tissue Name | 157982894 | 165518174 | Tissue Name | 157982894 | 165518174 |
| Liver | 4.4 | 2.9 | Kidney (fetal) | 20.2 | 13.8 |
| adenocarcinoma | | | | | |
| Pancreas | 13.8 | 10.1 | Renal ca. 786-0 | 10.7 | 14.8 |
| Pancreatic ca. | 2.1 | 10.2 | Renal ca. | 26.6 | 13.9 |
| CAPAN 2 | | | A498 | | |
| Adrenal gland | 24.7 | 16.2 | Renal ca. RXF | 3.0 | 18.2 |
| | | | 393 | | |
| Thyroid | 32.5 | 18.9 | Renal ca. | 6.7 | 12.7 |
| | | | ACHN | | |
| Salivary gland | 11.0 | 24.7 | Renal ca. UO-31 | 5.9 | 12.2 |
| Pituitary gland | 27.2 | 20.2 | Renal ca. TK-10 | 7.1 | 5.7 |
| Brain (fetal) | 11.9 | 23.5 | Liver | 17.8 | 16.7 |
| Brain (whole) | 26.2 | 52.1 | Liver (fetal) | 20.4 | 9.0 |
| Brain (amygdala) | 20.3 | 16.2 | Liver ca. | 15.2 | 9.6 |
| | | | (hepatoblast) | | |
| | | | HepG2 | | |
| Brain | 17.9 | 47.6 | Lung | 81.2 | 19.5 |
| (cerebellum) | | | | | |
| Brain | 100.0 | 54.3 | Lung (fetal) | 74.7 | 11.2 |
| (hippocampus) | | | | | |
| Brain (substantia | 12.9 | 20.0 | Lung ca. | 17.8 | 18.7 |
| nigra) | | | (small cell) | | |
| | | | LX-1 | | |
| Brain (thalamus) | 17.7 | 41.5 | Lung ca. | 1.0 | 0.0 |
| | | | (small cell) | | |
| | | | NCI-H69 | | |
| Cerebral Cortex | 24.3 | 15.0 | Lung ca. | 12.0 | 10.9 |
| | | | (s.cell var.) | | |
| | | | SHP-77 | | |
| Spinal cord | 23.5 | 38.7 | Lung ca. (large | 5.0 | 19.5 |
| | | | cell)NCI-H460 | | |
| glio/astro | 6.0 | 9.5 | Lung ca. (non- | 5.7 | 1.6 |
| U87-MG | | | sm. cell) A549 | | |
| glio/astro U-118- | 58.2 | 49.7 | Lung ca. (non- | 16.4 | 9.3 |
| MG | | | s.cell) NCI- | | |
| | | | H23 | | |
| astrocytoma | 8.2 | 10.4 | Lung ca. (non- | 7.8 | 17.8 |
| SW1783 | | | s.cell) HOP-62 | | |
| neuro*; met | 49.7 | 20.2 | Lung ca. (non- | 4.3 | 9.0 |
| SK-N-AS | | | s.cl) NCI- | | |
| | | | H522 | | |
| astrocytoma SF- | 13.6 | 25.7 | Lung ca. | 4.2 | 4.5 |
| 539 | | | (squam.) SW | | |
| | | | 900 | | |
| astrocytoma | 18.8 | 22.4 | Lung ca. | 0.4 | 3.1 |
| SNB-75 | | | (squam.) NCI- | | |
| | | | H596 | | |
| glioma SNB-19 | 16.7 | 25.9 | Mammary | 45.7 | 27.0 |
| | | | gland | | |
| glioma U251 | 18.4 | 59.9 | Breast ca.* | 5.0 | 4.3 |
| | | | (pl.ef) MCF-7 | | |
| glioma SF-295 | 12.1 | 15.4 | Breast ca.* | 39.2 | 47.3 |
| | | | (pl.ef) MDA- | | |
| | | | MB-231 | | |
| Heart (fetal) | 4.2 | 0.5 | Breast ca.* | 8.5 | 6.4 |
| | | | (pl.ef) T47D | | |
| Heart | 8.8 | 14.0 | Breast ca. | 17.0 | 12.9 |
| | | | BT-549 | | |
| Skeletal muscle | 77.9 | 7.0 | Breast ca. | 20.4 | 6.2 |
| (fetal) | | | MDA-N | | |
| Skeletal muscle | 19.2 | 100.0 | Ovary | 28.3 | 6.3 |
| Bone marrow | 33.9 | 33.9 | Ovarian ca. | 5.5 | 10.5 |
| | | | OVCAR-3 | | |
| Thymus | 25.2 | 32.1 | Ovarian ca. | 1.1 | 7.2 |
| | | | OVCAR-4 | | |
| Spleen | 44.1 | 27.9 | Ovarian ca. | 20.6 | 13.6 |
| | | | OVCAR-5 | | |
| Lymph node | 35.4 | 76.8 | Ovarian ca. | 10.5 | 4.6 |
| | | | OVCAR-8 | | |
| Colorectal | 40.6 | 38.7 | Ovarian ca. | 8.7 | 2.5 |
| | | | IGROV-1 | | |
| Stomach | 34.6 | 21.0 | Ovarian ca.* | 25.0 | 17.3 |
| | | | (ascites) | | |
| | | | SK-OV-3 | | |
| Small intestine | 48.0 | 60.7 | Uterus | 33.7 | 61.6 |
| Colon ca. SW480 | 8.6 | 7.6 | Plancenta | 16.7 | 2.9 |
| Colon ca.* | 11.4 | 2.9 | Prostate | 11.7 | 17.8 |
| SW620(SW480 | | | | | |
| met) | | | | | |
| Colon ca. HT29 | 4.5 | 0.8 | Prostate ca.* | 17.0 | 19.6 |
| | | | (bone met)PC-3 | | |
| Colon ca. | 6.3 | 3.6 | Testis | 48.6 | 50.7 |
| HCT-116 | | | | | |
| Colon ca. CaCo-2 | 4.5 | 3.1 | Melanoma | 9.7 | 9.5 |
| | | | Hs688(A).T | | |
| Colon ca. | 31.6 | 7.9 | Melanoma* | 5.6 | 15.8 |
| tissue(ODO3866) | | | (met) | | |
| | | | Hs688(B).T | | |
| Colon ca. | 40.6 | 10.3 | Melanoma | 2.4 | 7.6 |
| HCC-2998 | | | UACC-62 | | |
| Gastric ca.* (liver | 85.9 | 55.1 | Melanoma | 10.2 | 89.5 |
| met) NCI-N87 | | | M14 | | |
| Bladder | 19.6 | 22.2 | Melanoma | 2.2 | 2.2 |
| | | | LOX IMVI | | |
| Trachea | 53.2 | 17.4 | Melanoma* | 3.9 | 1.9 |
| | | | (met) | | |
| | | | SK-MEL-5 | | |
| Kidney | 15.5 | 19.5 | Adipose | 18.3 | 15.5 |

[0924] TABLE 68
Panel 2D

| | Rel. Exp. (%) Ag2313, Run | | Rel. Exp. (%) Ag2313, Run |
|---|---|---|---|
| Tissue Name | 160021614 | Tissue Name | 160021614 |
| Normal Colon | 56.3 | Kidney Margin | 4.5 |
| | | 8120608 | |
| CC Well to Mod Diff | 6.9 | Kidney Cancer | 2.7 |
| (ODO3866) | | 8120613 | |
| CC Margin (ODO3866) | 7.4 | Kidney Margin | 9.2 |
| | | 8120614 | |
| CC Gr.2 rectosigmoid | 5.4 | Kidney Cancer | 7.5 |
| (ODO3868) | | 9010320 | |
| CC Margin (ODO3868) | 4.3 | Kidney Margin | 16.3 |
| | | 9010321 | |
| CC Mod Diff (ODO3920) | 14.5 | Normal Uterus | 7.6 |
| CC Margin (ODO3920) | 21.0 | Uterus Cancer 064011 | 24.3 |
| CC Gr.2 ascend colon | 29.3 | Normal Thyroid | 7.6 |
| (ODO3921) | | | |
| CC Margin (ODO3921) | 9.0 | Thyroid Cancer | 10.9 |
| | | 064010 | |
| CC from Partial | 20.9 | Thyroid Cancer | 27.7 |
| Hepatectomy (ODO4309) | | A302152 | |
| Mets | | | |
| Liver Margin (ODO4309) | 11.0 | Thyroid Margin | 13.5 |
| | | A302153 | |
| Colon mets to lung | 8.3 | Normal Breast | 24.7 |
| (OD04451-01) | | | |
| Lung Margin (OD04451- | 14.8 | Breast Cancer | 9.1 |
| 02) | | (OD04566) | |
| Normal Prostate 6546-1 | 5.7 | Breast Cancer | 25.0 |
| | | (OD04590-01) | |
| Prostate Cancer | 14.4 | Breast Cancer Mets | 26.4 |
| (OD04410) | | (OD04590-03) | |
| Prostate Margin | 27.7 | Breast Cancer | 23.0 |
| (OD04410) | | Metastasis | |
| | | (OD04655-05) | |
| Prostate Cancer | 20.4 | Breast Cancer 064006 | 13.8 |
| (OD04720-01) | | | |
| Prostate Margin | 30.4 | Breast Cancer 1024 | 29.3 |
| (OD04720-02) | | | |
| Normal Lung 061010 | 94.6 | Breast Cancer | 14.9 |
| | | 9100266 | |
| Lung Met to Muscle | 7.3 | Breast Margin | 10.5 |
| (ODO4286) | | 9100265 | |
| Muscle Margin | 17.6 | Breast Cancer | 14.3 |
| (ODO4286) | | A209073 | |
| Lung Malignant Cancer | 27.2 | Breast Margin | 20.9 |
| (OD03126) | | A2090734 | |
| Lung Margin (OD03126) | 100.0 | Normal Liver | 13.5 |
| Lung Cancer (OD04404) | 18.7 | Liver Cancer 064003 | 48.3 |
| Lung Margin (OD04404) | 21.3 | Liver Cancer 1025 | 17.2 |
| Lung Cancer (OD04565) | 5.8 | Liver Cancer 1026 | 1.2 |
| Lung Margin (OD04565) | 22.2 | Liver Cancer 6004-T | 23.0 |
| Lung Cancer (OD04237- | 29.3 | Liver Tissue 6004-N | 9.1 |
| 01) | | | |
| Lung Margin (OD04237- | 18.9 | Liver Cancer 6005-T | 2.2 |
| 02) | | | |
| Ocular Mel Met to Liver | 23.8 | Liver Tissue 6005-N | 1.7 |
| (ODO4310) | | | |
| Liver Margin (ODO4310) | 9.5 | Normal Bladder | 27.4 |
| Melanoma Mets to Lung | 6.6 | Bladder Cancer 1023 | 5.1 |
| (OD04321) | | | |
| Lung Margin (OD04321) | 46.7 | Bladder Cancer | 12.3 |
| | | A302173 | |
| Normal Kidney | 94.0 | Bladder Cancer | 6.8 |
| | | (OD04718-01) | |
| Kidney Ca, Nuclear grade | 33.4 | Bladder Normal | 21.9 |
| 2 (OD04338) | | Adjacent (OD04718- | |
| | | 03) | |
| Kidney Margin | 31.2 | Normal Ovary | 4.5 |
| (OD04338) | | | |
| Kidney Ca Nuclear grade | 26.6 | Ovarian Cancer | 12.9 |
| 1/2 (OD04339) | | 064008 | |
| Kidney Margin | 53.2 | Ovarian Cancer | 26.1 |
| (OD04339) | | (OD04768-07) | |
| Kidney Ca, Clear cell | 23.7 | Ovary Margin | 7.3 |
| type (OD04340) | | (OD04768-08) | |
| Kidney Margin | 45.7 | Normal Stomach | 26.4 |
| (OD04340) | | | |
| Kidney Ca, Nuclear grade | 8.4 | Gastric Cancer | 3.8 |
| 3 (OD04348) | | 9060358 | |
| Kidney Margin | 28.1 | Stomach Margin | 6.3 |
| (OD04348) | | 9060359 | |
| Kidney Cancer | 6.4 | Gastric Cancer | 11.7 |
| (OD04622-01) | | 9060395 | |
| Kidney Margin | 4.6 | Stomach Margin | 9.1 |
| (OD04622-03) | | 9060394 | |
| Kidney Cancer | 12.2 | Gastric Cancer | 8.8 |
| (OD04450-01) | | 9060397 | |
| Kidney Margin | 22.7 | Stomach Margin | 6.0 |
| (OD04450-03) | | 9060396 | |
| Kidney Cancer 8120607 | 2.9 | Gastric Cancer | 29.9 |
| | | 064005 | |

[0925] TABLE 69
Panel 4D

| | Rel. Exp. (%) Ag2313, Run | | Rel. Exp. (%) Ag2313, Run |
|---|---|---|---|
| Tissue Name | 160021630 | Tissue Name | 160021630 |
| Secondary Th1 act | 7.6 | HUVEC IL-1 beta | 4.6 |
| Secondary Th2 act | 9.1 | HUVEC IFN gamma | 14.8 |
| Secondary Tr1 act | 8.2 | HUVEC TNF alpha + IFN | 9.8 |
| | | gamma | |
| Secondary Th1 rest | 8.0 | HUVEC TNF alpha + IL4 | 6.5 |
| Secondary Th2 rest | 8.4 | HUVEC IL-11 | 3.2 |
| Secondary Tr1 rest | 10.7 | Lung Microvascular EC | 7.3 |
| | | none | |
| Primary Th1 act | 0.0 | Lung Microvascular EC | 7.7 |
| | | TNFalpha + IL-1 beta | |
| Primary Th2 act | 4.4 | Microvascular Dermal EC | 13.7 |
| | | none | |
| Primary Tr1 act | 8.2 | Microsvasular Dermal EC | 7.6 |
| | | TNFalpha + IL-1 beta | |
| Primary Th1 rest | 43.8 | Bronchial epithelium | 25.7 |
| | | TNFalpha + IL1 beta | |
| Primary Th2 rest | 31.0 | Small airway epithelium | 5.4 |
| | | none | |
| Primary Tr1 rest | 16.0 | Small airway epithelium | 100.0 |
| | | TNFalpha + IL-1 beta | |
| CD45RA CD4 | 16.4 | Coronery artery SMC rest | 8.1 |
| lymphocyte act | | | |
| CD45RO CD4 | 11.2 | Coronery artery SMC | 3.9 |
| lymphocyte act | | TNFalpha + IL-1 beta | |
| CD8 lymphocyte act | 8.4 | Astrocytes rest | 3.3 |
| Secondary CD8 | 9.0 | Astrocytes TNFalpha + | 2.5 |
| lymphocyte rest | | IL-1 beta | |
| Secondary CD8 | 7.9 | KU-812 (Basophil) rest | 6.9 |
| lymphocyte act | | | |
| CD4 lymphocyte none | 11.7 | KU-812 (Basophil) | 11.4 |
| | | PMA/ionomycin | |
| 2ry Th1/Th2/Tr1_anti- | 13.4 | CCD1106 (Keratinocytes) | 12.3 |
| CD95 CH11 | | none | |
| LAK cells rest | 33.9 | CCD1106 (Keratinocytes) | 13.6 |
| | | TNFalpha + IL-1 beta | |
| LAK cells IL-2 | 20.7 | Liver cirrhosis | 4.7 |
| LAK cells IL-2 + IL-12 | 13.8 | Lupus kidney | 3.4 |
| LAK cells IL-2 + IFN | 31.2 | NCI-H292 none | 41.5 |
| gamma | | | |
| LAK cells IL-2 + IL-18 | 35.1 | NCI-H292 IL-4 | 54.7 |
| LAK cells | 7.9 | NCI-H292 IL-9 | 43.5 |
| PMA/ionomycin | | | |
| NK Cells IL-2 rest | 15.2 | NCI-H292 IL-13 | 19.3 |
| Two Way MLR 3 day | 23.3 | NCI-H292 IFN gamma | 36.9 |
| Two Way MLR 5 day | 6.3 | HPAEC none | 3.6 |
| Two Way MLR 7 day | 6.6 | HPAEC TNF alpha + IL-1 | 7.7 |
| | | beta | |
| PBMC rest | 10.0 | Lung fibroblast none | 8.1 |
| PBMC PWM | 33.0 | Lung fibroblast TNF alpha | 12.7 |
| | | + IL-1 beta | |
| PBMC PHA-L | 13.0 | Lung fibroblast IL-4 | 12.7 |
| Ramos (B cell) none | 3.2 | Lung fibroblast IL-9 | 10.0 |
| Ramos (B cell) | 11.2 | Lung fibroblast IL-13 | 7.6 |
| ionomycin | | | |
| B lymphocytes PWM | 42.6 | Lung fibroblast IFN | 25.7 |
| | | gamma | |
| B lymphocytes CD40L | 33.7 | Dermal fibroblast | 32.5 |
| and IL-4 | | CCD1070 rest | |
| EOL-1 dbcAMP | 22.8 | Dermal fibroblast | 74.2 |
| | | CCD1070 TNF alpha | |
| EOL-1 dbcAMP | 6.0 | Dermal fibroblast | 17.7 |
| PMA/ionomycin | | CCD1070 IL-1 beta | |
| Dendritic cells none | 21.0 | Dermal fibroblast IFN | 19.1 |
| | | gamma | |
| Dendritic cells LPS | 25.3 | Dermal fibroblast IL-4 | 27.9 |
| Dendritic cells anti- | 26.2 | IBD Colitis 2 | 0.6 |
| CD40 | | | |
| Monocytes rest | 39.5 | IBD Crohn's | 1.2 |
| Monocytes LPS | 2.2 | Colon | 21.6 |
| Macrophages rest | 26.1 | Lung | 17.1 |
| Macrophages LPS | 9.4 | Thymus | 49.3 |
| HUVEC none | 10.2 | Kidney | 35.1 |
| HUVEC starved | 17.1 | | |

[0926] AI_comprehensive panel_v1.0 Summary: Ag2313 The NOV11a gene is expressed in normal lung, bone, joint tissue, gut and skin. There is no apparent difference in transcript expression in disease tissue as compared to normal tissue. Please see Panel 4D for discussion of utility of this gene in an autoimmune context.

[0927] CNS_neurodegeneration_v1.0 Summary: Ag2313 The expression profile of the NOV11a gene shows higher expression in the temporal cortex of Alzheimer's disease victims. This gene encodes an alpha glucosidase homolog. Brain glucose regulation may play a role in Alzheimer's disease. For example, hyperglycemia may exert a deleterious effect by potentiating the neuronal death produced by pathological processes taking place, such as amyloid deposition. The category of agents that interfere with the absorption of glucose and lipids includes alpha-glucosidase inhibitors. Therefore, modulators of this gene product may be useful in the treatment of Alzheimer's disease.

[0928] References:

[0929] Messier C, Gagnon M. Glucose regulation and cognitive functions: relation to Alzheimer's disease and diabetes. Behav Brain Res February 1996;75(1-2):1-11

[0930] Glucose has been found to improve memory in animals and humans. Animal research has revealed that glucose may improve memory through a facilitation of acetylcholine (ACh) synthesis and release in the brain. This glucose-related memory improvement has prompted research in elderly humans. These studies have shown that the memory-improving action of glucose depends on each individuals' blood glucose regulation. Based on these data, researchers have evaluated the effect of glucose on memory in patients with Alzheimer's disease (AD). Results demonstrated that glucose could improve memory in a subset of patients that had abnormalities in their blood glucose regulation. Interestingly, these alterations in blood glucose regulation were believed to depend on the severity of the disease process. Another line of investigation has focused on alterations in brain glucose metabolism. Both animal models and studies with Type II diabetic elderly patients have shown that altered glucose regulation impairs learning and memory processes. It is possible that in AD patients, hyperglycemia exerts a deleterious effect by potentiating the neuronal death produced by other pathological processes taking place such as amyloid deposition. Based on these data, it appears important to find the prevalence of altered glucoregulation at various stages of AD. Secondly, it may be of interest to determine prospectively whether altered glucoregulation is linked to a faster progression of the disease. Finally, if such a relationship is observed, the next logical step would be to determine whether AD patients could benefit from treatments aimed at normalizing blood glucose regulation and improving insulin sensitivity.

[0931] Panel 1 Summary: Ag401 The expression of the NOV11a gene appears to be highest in a sample derived from testis tissue (CT=26.1). In addition to testis tissue, there appears to be substantial expression associated with the cerebellar region of the brain and mammary gland. The other samples in the panel show low uniform expression. Thus, the expression of this gene could be used to distinguish testis, mammary gland and cerebellum from the other samples in the panel.

[0932] Please see Panel CNS_neurodegeneration_v1.0 for discussion of potential utility of this gene in the central nervous system.

[0933] This gene is also moderately expressed in a number of metabolic tissues including pancreas, adrenal, thyroid, pituitary, heart, skeletal muscle, and adult and fetal liver. This small molecule target may be useful for the treatment of metabolic diseases, including obesity and Types 1 and 2 diabetes.

[0934] Panel 1.3D Summary: Ag401/Ag2313 Two experiments expression of the NOV11a gene in a wide variety of metabolic tissues, including pancreas, adipose, adrenal, thyroid, pituitary, adult and fetal heart, adult and fetal skeletal muscle, and adult and fetal liver. Alpha-glucosidase inhibitors are currently used in the treatment of Type 2 diabetes to decrease glucose absorption from the gut. Thus, this gene product may be a small molecule target for the treatment of metabolic diseases, including obesity and Types 1 and 2 diabetes.

[0935] Significant brain expression of the gene is also seen in this panel. Please see Panel CNS_neurodegeneration_v1.0 for discussion of potential utility of this gene in the central nervous system.

[0936] References:

[0937] Raptis S A, Dimitriadis G D. Oral hypoglycemic agents: insulin secretagogues, alpha-glucosidase inhibitors and insulin sensitizers. Exp Clin Endocrinol Diabetes. 2001;109 Suppl 2:S265-87.

[0938] In this review we present the agents that are in use in the treatment of type 2 diabetes. Sulfonylureas of the 1st and 2nd generation increase insulin secretion but can induce hyperinsulinemia and sometimes prolonged hypoglycemia. Glimepiride is a new 3rd generation sulfonylurea with some advantages over the other members of this group, such as a lower risk of hypoglycemia, no interaction with cardiovascular KATP-channels and a possibility that it may increase insulin sensitivity. There are also newer insulin secretagogues (such as neteglinide and repaglinide) with a rapid onset of action on the beta-cell, therefore inducing a more physiological profile of insulin secretion during meals. The category of insulin sensitizers includes metformin and thiazolidinediones. Metformin effectively reduces hyperglycemia, hyperlipidemia and macroangiopathy in patients with type 2 diabetes. This agent increases the sensitivity of the liver and peripheral tissues to insulin and, therefore, it could be considered as a drug of choice for the prevention of type 2 diabetes. Thiazolidinediones (rosiglitazone and pioglitazone) increase the sensitivity of the tissues to insulin. This mechanism of action makes them powerful therapeutic tools for the treatment of type 2 diabetes (and possibly other insulin resistant states) either alone or in combination with other oral agents. The category of agents that interfere with the absorption of glucose and lipids includes alpha-glucosidase inhibitors (acarbose and miglitol) and lipase inhibitors (or-listat). alpha-Glucocidase inhibitors improve the time relationship between plasma insulin and glucose increases after a meal. Therefore, these agents may be used in the treatment of patients with type 2 diabetes, either alone at a very early stage of this disease (when insulin secretion is still adequate), or in combination with insulin secretagogues. alpha-Glucosidase inhibition may also prove useful as a supplement to insulin therapy in patients with type 1 diabetes mellitus. The inhibitor of gastrointestinal lipase orlistat may prove, a useful adjunct to hypocaloric diets in patients with type 2 diabetes and obesity.

[0939] PMID: 11460577

[0940] Panel 2D Summary: Ag2313 The expression of the NOV11a gene appears to be highest in a sample derived from normal lung tissue adjacent to malignant lung (CT=27.3). In addition there is substantial expression associated with another sample of normal lung tissue as well a number of normal kidney tissue samples while absent in adjacent malignant kidney.

[0941] Thus, the expression of this gene could be used to distinguish these tissues from other tissues in the panel. Moreover, therapeutic modulation of this gene, through the use of small molecule drugs, antibodies or protein therapeutics might be of benefit in the treatment of lung or kidney cancer.

[0942] Panel 4D Summary: Ag2313 The NOV11a transcript is expressed at high levels in small airway epithelium activated with TNFalpha and IL-1beta. It is also expressed in normal tissues such as the lung, thymus and kidney, as seen in Panel AI. The protein encoded by this transcript is related to Alpha glucosidase A. This enzyme is important in lung maturation and may contribute to surfactant phospholipid biosynthesis (see reference). Therefore, therapeutics designed with the protein encoded by this transcript or therapeutics that modulate its production could potentially be used to aid lung surfactant production in premature infants, and to treat lung injuries.

[0943] References:

[0944] Bourbon J R, Doucet E, Rieutort M. Role of alpha-glucosidase in fetal lung maturation.Biochim Biophys Acta Jan. 13, 1987;917(1):203-10

[0945] The role of lysosomal enzyme acid alpha-glucosidase in fetal lung development was investigated with the aid of a specific inhibitor, the pseudosaccharide acarbose. The drug was added to a Waymouth culture medium of fetal rat lung explants cultivated for 48 h fromgestational stage 19.5 days, an in vitro system previously shown to allow morphological and biochemical maturation of alveolar epithelium. Glycogenolysis was reduced by 40% as compared with tissue cultivated on control medium, which means thatalpha-glucosidase could account for as much as 40% of fetal lung glycogenolysis, the remaining 60% being presumably achieved by cytosolic phosphorylase and by a microsomal neutral alpha-glucosidase. By the same time, the increase of phospholipids of surfactant fraction extracted from cultivated explants was partially inhibited: total and saturated phosphatidylcholine, phosphatidylethanolamine, phosphatidylglycerol and phosphatidylinositol were about 30-40% lower than in lungs cultivated on control medium. It should beemphasized that DNA concentration and increases in non-surfactant phospholipids were unchanged by the drug. alpha-Glucosidase activity was evidenced in the lysosomal fraction, in the microsomal fraction and, although in lower amounts, in the surfactant fraction extracted from term fetal lung. The results suggest that lysosomal alpha-glucosidase plays a major role in lung maturation and could facilitate glycogenolysis for the specific use of glycogen stores in providing substrates for surfactant phospholipid biosynthesis.PMID: 3539207

[0946] NOV11b

[0947] Expression of gene NOV11b was assessed using the primer-probe sets Ag3195 and Ag401, described in Tables 70, 71, and 72. Results of the RTQ-PCR runs are shown in Tables 73, 74, 75, 76, 77, 78 and 79.

TABLE 70

Probe Name Ag3195

| | | | | |
|---|---|---|---|---|
| Primers | Sequences | Length | Start Position | SEQ ID NO: |

| | | | | |
|---|---|---|---|---|
| Forward | 5′-aatagttttgctgaccagagg-3′ | 21 | 2730 | 220 |
| Probe | TET-5′-cccagcaagtgtgtggtggag-3′-TAMRA | 21 | 2760 | 221 |
| Reverse | 5′tgatctttaccatcagatgagt-3′ | 22 | 2830 | 222 |

[0948] TABLE 71

Probe Name Ag401

| | | | | |
|---|---|---|---|---|
| Primers | Sequences | Length | Start Position | SEQ ID NO: |

| | | | | |
|---|---|---|---|---|
| Forward | 5′-ttgtgccaaaacatccatcct-3′ | 21 | 70 | 223 |
| Probe | TET-5′-agcctggagaagctctcactcaacattgc-3′-TAMRA | 29 | 2892 | 224 |
| Reverse | 5′-tatgatgcggacctcccagt-3′ | 20 | 2926 | 225 |

[0949] TABLE 72

Probe Name Ag3154

| | | | | |
|---|---|---|---|---|
| Primers | Sequences | Length | Start Position | SEQ ID NO: |

| | | | | |
|---|---|---|---|---|
| Forward | 5′-ccgtaatgctgtcccacttat-3′ | 21 | 4249 | 226 |
| Probe | TET-5′-tgtgctctacttagcattctcagggatca-3′-TAMRA | 29 | 4273 | 227 |
| Reverse | 5′-aggagaacgcagacatactgaa-3′ | 22 | 4314 | 228 |

[0950] TABLE 73
A1_comprehensive panel_v1.0

| | Rel. Exp. (%) Ag3195, Run | | Rel. Exp. (%) Ag3195, Run |
|---|---|---|---|
| Tissue Name | 225147682 | Tissue Name | 225147682 |
| 110967 COPD-F | 17.3 | 112427 Match Control | 66.9 |
| | | Psoriasis-F | |
| 110980 COPD-F | 15.3 | 112418 Psoriasis-M | 14.2 |
| 110968 COPD-M | 14.4 | 112723 Match Control | 4.0 |
| | | Psoriasis-M | |
| 110977 COPD-M | 37.1 | 112419 Psoriasis-M | 19.5 |
| 110989 Emphysema-F | 29.1 | 112424 Match Control | 13.7 |
| | | Psoriasis-M | |
| 110992 Emphysema-F | 11.3 | 112420 Psoriasis-M | 59.0 |
| 110993 Emphysema-F | 9.9 | 112425 Match Control | 57.8 |
| | | Psoriasis-M | |
| 110994 Emphysema-F | 9.3 | 104689 (MF) OA | 33.4 |
| | | Bone-Backus | |
| 110995 Emphysema-F | 25.3 | 104690 (MF) Adj | 22.4 |
| | | “Normal” Bone-Backus | |
| 110996 Emphysema-F | 3.2 | 104691 (MF) OA | 28.5 |
| | | Synovium-Backus | |
| 110997 Asthma-M | 4.8 | 104692 (BA) OA | 14.8 |
| | | Cartilage-Backus | |
| 111001 Asthma-F | 18.8 | 104694 (BA) OA | 22.1 |
| | | Bone-Backus | |
| 111002 Asthma-F | 13.6 | 104695 (BA) Adj | 27.0 |
| | | “Normal” Bone-Backus | |
| 111003 Atopic | 14.6 | 104696 (BA) OA | 15.5 |
| Asthma-F | | Synovium-Backus | |
| 111004 Atopic | 21.5 | 104700 (SS) OA Bone- | 16.6 |
| Asthma-F | | Backus | |
| 111005 Atopic | 14.5 | 104701 (SS) Adj | 16.5 |
| Asthma-F | | “Normal” Bone-Backus | |
| 111006 Atopic | 2.1 | 104702 (SS) OA | 29.1 |
| Asthma-F | | Synovium-Backus | |
| 111417 Allergy-M | 12.2 | 117093 OA Cartilage | 33.0 |
| | | Rep7 | |
| 112347 Allergy-M | 0.0 | 112672 OA Bone5 | 19.2 |
| 112349 Normal Lung-F | 0.0 | 112673 OA Synovium5 | 11.0 |
| 112357 Normal Lung-F | 11.6 | 112674 OA Synovial | 8.1 |
| | | Fluid cells5 | |
| 112354 Normal Lung-M | 14.9 | 117100 OA Cartilage | 5.0 |
| | | Rep14 | |
| 112374 Crohns-F | 18.6 | 112756 OA Bone9 | 5.4 |
| 112389 Match | 15.7 | 112757 OA Synovium9 | 25.7 |
| Control Crohns-F | | | |
| 112375 Crohns-F | 16.8 | 112758 OA Synovial | 15.6 |
| | | Fluid Cells9 | |
| 112732 Match | 20.4 | 117125 RA Cartilage | 19.1 |
| Control Crohns-F | | Rep2 | |
| 112725 Crohns-M | 3.8 | 113492 Bone2 RA | 26.8 |
| 112387 Match | 15.7 | 113493 Synovium2 RA | 8.9 |
| Control Crohns-M | | | |
| 112378 Crohns-M | 0.0 | 113494 Syn Fluid Cells | 19.5 |
| | | RA | |
| 112390 Match | 100.0 | 113499 Cartilage4 RA | 19.8 |
| Control Crohns-M | | | |
| 112726 Crohns-M | 23.0 | 113500 Bone4 RA | 27.9 |
| 112731 Match | 14.1 | 113501 Synovium4 RA | 19.2 |
| Control Crohns-M | | | |
| 112380 Ulcer Col-F | 41.8 | 113502 Syn Fluid | 13.6 |
| | | Cells4 RA | |
| 112734 Match | 46.7 | 113495 Cartilage3 RA | 17.2 |
| Control Ulcer Col-F | | | |
| 112384 Ulcer Col-F | 51.4 | 113496 Bone3 RA | 19.9 |
| 112737 Match | 6.5 | 113497 Synovium3 RA | 9.8 |
| Control Ulcer Col-F | | | |
| 112386 Ulcer Col-F | 10.4 | 113498 Syn Fluid | 25.2 |
| | | Cells3 RA | |
| 112738 Match | 4.5 | 117106 Normal | 6.2 |
| Control Ulcer Col-F | | Cartilage Rep20 | |
| 112381 Ulcer Col-M | 0.0 | 113663 Bone3 Normal | 0.0 |
| 112735 Match | 7.4 | 113664 Synovium3 | 0.0 |
| Control Ulcer Col-M | | Normal | |
| 112382 Ulcer Col-M | 11.3 | 113665 Syn Fluid | 0.0 |
| | | Cells3 Normal | |
| 112394 Match | 6.4 | 117107 Normal | 8.1 |
| Control Ulcer Col-M | | Cartilage Rep22 | |
| 112383 Ulcer Col-M | 21.2 | 113667 Bone4 Normal | 11.0 |
| 112736 Match | 9.6 | 113668 Synovium4 | 15.7 |
| Control Ulcer Col-M | | Normal | |
| 112423 Psoriasis-F | 17.9 | 113669 Syn Fluid | 18.0 |
| | | Cells4 Normal | |

[0951] TABLE 74
CNS_neurodegeneration_v1.0

| | Rel. Exp. (%) Ag3195, | | Rel. Exp. (%) Ag3195, |
|---|---|---|---|
| Tissue Name | Run 209859542 | Tissue Name | Run 209859542 |
| AD 1 Hippo | 16.6 | Control (Path) 3 | 6.5 |
| | | Temporal Ctx | |
| AD 2 Hippo | 31.0 | Control (Path) 4 | 34.4 |
| | | Temporal Ctx | |
| AD 3 Hippo | 6.8 | AD 1 Occipital Ctx | 14.0 |
| AD 4 Hippo | 8.7 | AD 2 Occipital Ctx | 0.0 |
| | | (Missing) | |
| AD 5 hippo | 60.7 | AD 3 Occipital Ctx | 13.1 |
| AD 6 Hippo | 63.7 | AD 4 Occipital Ctx | 29.1 |
| Control 2 Hippo | 32.1 | AD 5 Occipital Ctx | 19.6 |
| Control 4 Hippo | 17.6 | AD 6 Occipital Ctx | 26.8 |
| Control (Path) 3 | 12.8 | Control 1 Occipital | 3.3 |
| Hippo | | Ctx | |
| AD 1 Temporal Ctx | 35.6 | Control 2 Occipital | 51.1 |
| | | Ctx | |
| AD 2 Temporal Ctx | 37.1 | Control 3 Occipital | 15.3 |
| | | Ctx | |
| AD 3 Temporal Ctx | 7.9 | Control 4 Occipital | 12.8 |
| | | Ctx | |
| AD 4 Temporal Ctx | 32.8 | Control (Path) 1 | 100.0 |
| | | Occipital Ctx | |
| AD 5 Inf Temporal | 95.9 | Control (Path) 2 | 16.4 |
| Ctx | | Occipital Ctx | |
| AD 5 SupTemporal | 56.3 | Control (Path) 3 | 8.4 |
| Ctx | | Occipital Ctx | |
| AD 6 Inf Temporal | 90.8 | Control (Path) 4 | 17.4 |
| Ctx | | Occipital Ctx | |
| AD 6 Sup Temporal | 68.8 | Control 1 Parietal | 8.4 |
| Ctx | | Ctx | |
| Control 1 Temporal | 4.9 | Control 2 Parietal | 57.8 |
| Ctx | | Ctx | |
| Control 2 Temporal | 33.7 | Control 3 Parietal | 14.4 |
| Ctx | | Ctx | |
| Control 3 Temporal | 14.1 | Control (Path) 1 | 63.7 |
| Ctx | | Parietal Ctx | |
| Control 4 Temporal | 9.4 | Control (Path) 2 | 28.7 |
| Ctx | | Parietal Ctx | |
| Control (Path) 1 | 49.0 | Control (Path) 3 | 3.6 |
| Temporal Ctx | | Parietal Ctx | |
| Control (Path) 2 | 32.1 | Control (Path) 4 | 56.3 |
| Temporal Ctx | | Parietal Ctx | |

[0952] TABLE 75
Panel 1

| | Rel. Exp. (%) Ag401, | | Rel. Exp. (%) Ag401, |
|---|---|---|---|
| Tissue Name | Run 88225002 | Tissue Name | Run 88225002 |
| Endothelial cells | 1.5 | Renal ca. 786-0 | 10.7 |
| Endothelial cells | 2.5 | Renal ca. A498 | 4.2 |
| (treated) | | | |
| Pancreas | 11.0 | Renal ca. RXF 393 | 4.8 |
| Pancreatic ca. CAPAN 2 | 2.6 | Renal ca. ACHN | 4.9 |
| Adrenal gland | 8.5 | Renal ca. UO-31 | 3.8 |
| Thyroid | 13.6 | Renal ca. TK-10 | 5.0 |
| Salivary gland | 12.7 | Liver | 24.0 |
| Pituitary gland | 8.3 | Liver (fetal) | 4.0 |
| Brain (fetal) | 4.2 | Liver ca. (hepatoblast) | 7.1 |
| | | HepG2 | |
| Brain (whole) | 14.7 | Lung | 3.1 |
| Brain (amygdala) | 4.1 | Lung (fetal) | 12.9 |
| Brain (cerebellum) | 74.2 | Lung ca. (small cell) | 9.5 |
| | | LX-1 | |
| Brain (hippocampus) | 7.4 | Lung ca. (small cell) | 0.8 |
| | | NCI-H69 | |
| Brain (substantia nigra) | 13.6 | Lung ca. (s.cell var.) | 13.2 |
| | | SHP-77 | |
| Brain (thalamus) | 7.3 | Lung ca. (large | 8.5 |
| | | cell) NCI-H460 | |
| Brain (hypothalamus) | 12.6 | Lung ca. (non-sm. | 4.3 |
| | | cell) A549 | |
| Spinal cord | 12.9 | Lung ca. (non-s.cell) | 5.7 |
| | | NCI-H23 | |
| glio/astro U87-MG | 3.5 | Lung ca. (non-s.cell) | 3.7 |
| | | HOP-62 | |
| glio/astro U-118-MG | 7.6 | Lung ca. (non-s.cl) | 10.9 |
| | | NCI-H522 | |
| astrocytoma SW1783 | 2.0 | Lung ca. (squam.) SW | 8.4 |
| | | 900 | |
| neuro*; met SK-N-AS | 4.4 | Lung ca. (squam.) | 1.2 |
| | | NCI-H596 | |
| astrocytoma SF-539 | 5.6 | Mammary gland | 32.1 |
| astrocytoma SNB-75 | 5.4 | Breast ca.* (pl.ef) | 5.6 |
| | | MCF-7 | |
| glioma SNB-19 | 7.0 | Breast ca.* (pl.ef) | 3.3 |
| | | MDA-MB-231 | |
| glioma U251 | 5.5 | Breast ca.* (pl. ef) | 12.3 |
| | | T47D | |
| glioma SF-295 | 5.3 | Breast ca. BT-549 | 6.7 |
| Heart | 8.8 | Breast ca. MDA-N | 8.8 |
| Skeletal muscle | 14.6 | Ovary | 10.4 |
| Bone marrow | 9.3 | Ovarian ca. OVCAR-3 | 3.1 |
| Thymus | 27.7 | Ovarian ca. OVCAR-4 | 1.4 |
| Spleen | 14.6 | Ovarian ca. OVCAR-5 | 12.6 |
| Lymph node | 21.6 | Ovarian ca. OVCAR-8 | 3.4 |
| Colon (ascending) | 13.7 | Ovarian ca. IGROV-1 | 3.2 |
| Stomach | 20.4 | Ovarian ca. (ascites) | 8.3 |
| | | SK-OV-3 | |
| Small intestine | 17.4 | Uterus | 16.7 |
| Colon ca. SW480 | 1.5 | Placenta | 11.2 |
| Colon ca.* SW620 | 4.2 | Prostate | 12.4 |
| (SW480 met) | | | |
| Colon ca. HT29 | 1.5 | Prostate ca.* (bone | 13.1 |
| | | met) PC-3 | |
| Colon ca. HCT-116 | 5.3 | Testis | 100.0 |
| Colon ca. CaCo-2 | 3.5 | Melanoma | 12.4 |
| | | Hs688(A).T | |
| Colon ca. HCT-15 | 7.2 | Melanoma* (met) | 6.4 |
| | | Hs688(B).T | |
| Colon ca. HCC-2998 | 6.4 | Melanoma UACC-62 | 1.6 |
| Gastric ca. * (liver met) | 26.1 | Melanoma M14 | 33.9 |
| NCI-N87 | | | |
| Bladder | 4.3 | Melanoma LOX | 8.0 |
| | | IMVI | |
| Trachea | 20.9 | Melanoma* (met) SK- | 3.0 |
| | | MEL-5 | |
| Kidney | 14.9 | Melanoma SK-MEL-28 | 15.9 |
| Kidney (fetal) | 17.3 | | |

[0953] TABLE 76
Panel 1.3D

| | Rel. | Rel. | Rel. | | Rel. | Rel. | Rel. |
|---|---|---|---|---|---|---|---|
| | Exp. (%) | Exp. (%) | Exp. (%) | | Exp. (%) | Exp. (%) | Exp. (%) |
| | Ag3195, | Ag3195, | Ag401, | | Ag3195, | Ag3195, | Ag401, |
| | Run | Run | Run | | Run | Run | Run |
| | 16552493 | 16567539 | 16551817 | Tissue | 16552493 | 16567539 | 16551817 |
| Tissue Name | 0 | 1 | 4 | Name | 0 | 1 | 4 |
| Liver | 9.0 | 3.3 | 2.9 | Kidney | 13.9 | 7.2 | 13.8 |
| adenocarcinoma | | | | (fetal) | | | |
| Pancreas | 19.5 | 10.0 | 10.1 | Renal ca. | 14.5 | 7.7 | 14.8 |
| | | | | 786-0 | | | |
| Pancreatic ca. | 0.6 | 0.0 | 10.2 | Renal ca. | 9.9 | 13.9 | 13.9 |
| CAPAN 2 | | | | A498 | | | |
| Adrenal gland | 12.9 | 8.2 | 16.2 | Renal ca. | 10.7 | 9.4 | 18.2 |
| | | | | RXF 393 | | | |
| Thyroid | 14.3 | 11.3 | 18.9 | Renal ca. | 3.6 | 4.1 | 12.7 |
| | | | | ACHN | | | |
| Salivary gland | 11.8 | 15.6 | 24.7 | Renal ca. | 1.8 | 3.1 | 12.2 |
| | | | | UO-31 | | | |
| Pituitary gland | 11.0 | 7.0 | 20.2 | Renal ca. | 3.4 | 3.2 | 5.7 |
| | | | | TK-10 | | | |
| Brain (fetal) | 13.3 | 13.9 | 23.5 | Liver | 21.5 | 16.2 | 16.7 |
| Brain (whole) | 51.4 | 36.3 | 52.1 | Liver (fetal) | 8.8 | 13.8 | 9.0 |
| Brain | 39.5 | 29.7 | 16.2 | Liver ca. | 6.6 | 15.4 | 9.6 |
| (amygdala) | | | | (hepatoblast) | | | |
| | | | | HepG2 | | | |
| Brain | 26.4 | 27.2 | 47.6 | Lung | 26.2 | 47.6 | 19.5 |
| (cerebellum) | | | | | | | |
| Brain | 39.8 | 22.7 | 54.3 | Lung (fetal) | 25.3 | 62.0 | 11.2 |
| (hippocampus) | | | | | | | |
| Brain | 26.6 | 22.2 | 20.0 | Lung ca. | 11.1 | 14.1 | 18.7 |
| (substantia | | | | (small cell) | | | |
| nigra) | | | | LX-1 | | | |
| Brain | 46.3 | 27.0 | 41.5 | Lung ca. | 0.4 | 0.0 | 0.0 |
| (thalamus) | | | | (small cell) | | | |
| | | | | NCI-H69 | | | |
| Cerebral Cortex | 5.0 | 8.2 | 15.0 | Lung ca. | 6.3 | 10.7 | 10.9 |
| | | | | (s.cell var.) | | | |
| | | | | SHP-77 | | | |
| Spinal cord | 46.3 | 38.7 | 38.7 | Lung ca. | 13.5 | 18.0 | 19.5 |
| | | | | (large | | | |
| | | | | cell) NCI- | | | |
| | | | | H460 | | | |
| glio/astro U87- | 2.4 | 1.6 | 9.5 | Lung ca. | 0.8 | 1.8 | 1.6 |
| MG | | | | (non-sm. | | | |
| | | | | cell) A549 | | | |
| glio/astro U- | 28.9 | 29.3 | 49.7 | Lung ca. | 5.1 | 3.2 | 9.3 |
| 118-MG | | | | (non-s.cell) | | | |
| | | | | NCI-H23 | | | |
| astrocytoma | 8.2 | 10.9 | 10.4 | Lung ca. | 19.2 | 7.6 | 17.8 |
| SW1783 | | | | (non-s.cell) | | | |
| | | | | HOP-62 | | | |
| neuro*; met SK- | 11.7 | 6.3 | 20.2 | Lung ca. | 2.2 | 2.9 | 9.0 |
| N-AS | | | | (non-s.cl) | | | |
| | | | | NCI-H522 | | | |
| astrocytoma SF- | 16.4 | 9.2 | 25.7 | Lung ca. | 8.1 | 6.5 | 4.5 |
| 539 | | | | (squam.) | | | |
| | | | | SW 900 | | | |
| astrocytoma | 8.3 | 14.5 | 22.4 | Lung ca. | 0.0 | 1.6 | 3.1 |
| SNB-75 | | | | (squam.) | | | |
| | | | | NCI-H596 | | | |
| glioma SNB-19 | 3.2 | 5.5 | 25.9 | Mammary | 44.1 | 22.1 | 27.0 |
| | | | | gland | | | |
| glioma U251 | 26.6 | 20.3 | 59.9 | Breast ca.* | 4.4 | 1.7 | 4.3 |
| | | | | (pl.ef) | | | |
| | | | | MCF-7 | | | |
| glioma SF-295 | 10.1 | 5.5 | 15.4 | Breast ca.* | 21.0 | 15.4 | 47.3 |
| | | | | (pl.ef) | | | |
| | | | | MDA-MB- | | | |
| | | | | 231 | | | |
| Heart (fetal) | 1.9 | 2.5 | 0.5 | Breast ca.* | 3.1 | 4.9 | 6.4 |
| | | | | (pl.ef) | | | |
| | | | | T47D | | | |
| Heart | 8.0 | 15.2 | 14.0 | Breast ca. | 12.5 | 7.3 | 12.9 |
| | | | | BT-549 | | | |
| Skeletal muscle | 2.9 | 1.8 | 7.0 | Breast ca. | 4.4 | 1.9 | 6.2 |
| (fetal) | | | | MDA-N | | | |
| Skeletal muscle | 57.0 | 58.2 | 100.0 | Ovary | 10.9 | 6.5 | 6.3 |
| Bone marrow | 28.1 | 13.0 | 33.9 | Ovarian ca. | 8.4 | 6.3 | 10.5 |
| | | | | OVCAR-3 | | | |
| Thymus | 27.2 | 16.0 | 32.1 | Ovarian ca. | 3.6 | 2.9 | 7.2 |
| | | | | OVCAR-4 | | | |
| Spleen | 39.0 | 27.0 | 27.9 | Ovarian ca. | 11.2 | 9.2 | 13.6 |
| | | | | OVCAR-5 | | | |
| Lymph node | 100.0 | 100.0 | 76.8 | Ovarian ca. | 3.9 | 4.5 | 4.6 |
| | | | | OVCAR-8 | | | |
| Colorectal | 25.0 | 23.2 | 38.7 | Ovarian ca. | 16.3 | 1.6 | 2.5 |
| | | | | IGROV-1 | | | |
| Stomach | 23.3 | 25.3 | 21.0 | Ovarian | 10.1 | 11.6 | 17.3 |
| | | | | ca.* | | | |
| | | | | (ascites) | | | |
| | | | | SK-OV-3 | | | |
| Small intestine | 55.9 | 41.8 | 60.7 | Uterus | 65.5 | 61.1 | 61.6 |
| Colon ca. | 5.6 | 2.9 | 7.6 | Placenta | 6.6 | 10.2 | 2.9 |
| SW480 | | | | | | | |
| Colon ca.* | 6.7 | 4.9 | 2.9 | Prostate | 14.8 | 8.5 | 17.8 |
| SW620(SW480 | | | | | | | |
| met) | | | | | | | |
| Colon ca. HT29 | 2.8 | 1.1 | 0.8 | Prostate | 3.5 | 6.9 | 19.6 |
| | | | | ca.* (bone | | | |
| | | | | met)PC-3 | | | |
| Colon ca. HCT- | 4.5 | 3.2 | 3.6 | Testis | 45.1 | 23.8 | 50.7 |
| 116 | | | | | | | |
| Colon ca. | 2.0 | 2.0 | 3.1 | Melanoma | 7.2 | 3.7 | 9.5 |
| CaCo-2 | | | | Hs688(A).T | | | |
| Colon ca. | 14.5 | 5.8 | 7.9 | Melanoma* | 10.0 | 6.7 | 15.8 |
| tissue(ODO3866) | | | | (met) | | | |
| | | | | Hs688(B).T | | | |
| Colon ca. HCC- | 6.4 | 4.6 | 10.3 | Melanoma | 16.5 | 12.5 | 7.6 |
| 2998 | | | | UACC-62 | | | |
| Gastric ca.* | 48.0 | 34.9 | 55.1 | Melanoma | 73.7 | 51.8 | 89.5 |
| (liver met) NCI- | | | | M14 | | | |
| N87 | | | | | | | |
| Bladder | 21.3 | 23.3 | 22.2 | Melanoma | 1.1 | 0.6 | 2.2 |
| | | | | LOX IMVI | | | |
| Trachea | 21.5 | 26.1 | 17.4 | Melanoma* | 0.4 | 1.7 | 1.9 |
| | | | | (met) SK- | | | |
| | | | | MEL-5 | | | |
| Kidney | 44.8 | 35.8 | 19.5 | Adipose | 22.1 | 9.9 | 15.5 |

[0954] TABLE 77
Panel 2D

| | Rel. Exp. (%) Ag3195, Run | | Rel. Exp. (%) Ag3195, Run |
|---|---|---|---|
| Tissue Name | 165003127 | Tissue Name | 165003127 |
| Normal Colon | 51.1 | Kidney Margin | 1.4 |
| | | 8120608 | |
| CC Well to Mod Diff | 6.9 | Kidney Cancer | 2.5 |
| (ODO3866) | | 8120613 | |
| CC Margin (ODO3866) | 5.9 | Kidney Margin | 6.7 |
| | | 8120614 | |
| CC Gr.2 rectosigmoid | 4.3 | Kidney Cancer | 9.0 |
| (ODO3868) | | 9010320 | |
| CC Margin (ODO3868) | 2.4 | Kidney Margin | 15.5 |
| | | 9010321 | |
| CC Mod Diff (ODO3920) | 6.4 | Normal Uterus | 5.9 |
| CC Margin (ODO3920) | 12.6 | Uterus Cancer 064011 | 31.9 |
| CC Gr.2 ascend colon | 24.3 | Normal Thyroid | 10.2 |
| (ODO3921) | | | |
| CC Margin (ODO3921) | 9.2 | Thyroid Cancer | 12.5 |
| | | 064010 | |
| CC from Partial | 22.8 | Thyroid Cancer | 16.2 |
| Hepatectomy (ODO4309) | | A302152 | |
| Mets | | | |
| Liver Margin (ODO4309) | 14.7 | Thyroid Margin | 18.9 |
| | | A302153 | |
| Colon mets to lung | 3.5 | Normal Breast | 24.8 |
| (OD04451-01) | | | |
| Lung Margin (OD04451- | 7.1 | Breast Cancer | 5.8 |
| 02) | | (OD04566) | |
| Normal Prostate 6546-1 | 25.5 | Breast Cancer | 16.0 |
| | | (OD04590-01) | |
| Prostate Cancer | 10.6 | Breast Cancer Mets | 28.9 |
| (OD04410) | | (OD04590-03) | |
| Prostate Margin | 9.4 | Breast Cancer | 7.9 |
| (OD04410) | | Metastasis | |
| | | (OD04655-05) | |
| Prostate Cancer | 15.2 | Breast Cancer 064006 | 10.4 |
| (OD04720-01) | | | |
| Prostate Margin | 24.0 | Breast Cancer 1024 | 10.7 |
| (OD04720-02) | | | |
| Normal Lung 061010 | 100.0 | Breast Cancer | 7.2 |
| | | 9100266 | |
| Lung Met to Muscle | 5.3 | Breast Margin | 7.2 |
| (ODO4286) | | 9100265 | |
| Muscle Margin | 13.7 | Breast Cancer | 17.2 |
| (ODO4286) | | A209073 | |
| Lung Malignant Cancer | 24.0 | Breast Margin | 12.2 |
| (OD03126) | | A2090734 | |
| Lung Margin (OD03126) | 74.7 | Normal Liver | 27.0 |
| Lung Cancer (OD04404) | 14.0 | Liver Cancer 064003 | 45.7 |
| Lung Margin (OD04404) | 18.9 | Liver Cancer 1025 | 8.6 |
| Lung Cancer (OD04565) | 8.0 | Liver Cancer 1026 | 1.8 |
| Lung Margin (OD04565) | 16.7 | Liver Cancer 6004-T | 0.7 |
| Lung Cancer (OD04237- | 23.8 | Liver Tissue 6004-N | 6.0 |
| 01) | | | |
| Lung Margin (OD04237- | 17.3 | Liver Cancer 6005-T | 1.7 |
| 02) | | | |
| Ocular Mel Met to Liver | 19.3 | Liver Tissue 6005-N | 1.5 |
| (ODO4310) | | | |
| Liver Margin (ODO4310) | 14.3 | Normal Bladder | 35.6 |
| Melanoma Mets to Lung | 7.6 | Bladder Cancer 1023 | 3.2 |
| (OD04321) | | | |
| Lung Margin (OD04321) | 40.3 | Bladder Cancer | 15.7 |
| | | A302173 | |
| Normal Kidney | 87.7 | Bladder Cancer | 6.7 |
| | | (OD04718-01) | |
| Kidney Ca, Nuclear grade | 28.9 | Bladder Normal | 21.6 |
| 2 (OD04338) | | Adjacent (OD04718- | |
| | | 03) | |
| Kidney Margin | 25.2 | Normal Ovary | 3.7 |
| (OD04338) | | | |
| Kidney Ca Nuclear grade | 34.4 | Ovarian Cancer | 11.3 |
| 1/2 (OD04339) | | 064008 | |
| Kidney Margin | 35.6 | Ovarian Cancer | 25.0 |
| (OD04339) | | (OD04768-07) | |
| Kidney Ca, Clear cell | 20.9 | Ovary Margin | 3.7 |
| type (OD04340) | | (OD04768-08) | |
| Kidney Margin | 34.2 | Normal Stomach | 18.4 |
| (OD04340) | | | |
| Kidney Ca, Nuclear grade | 7.7 | Gastric Cancer | 4.0 |
| 3 (OD04348) | | 9060358 | |
| Kidney Margin | 28.5 | Stomach Margin | 8.2 |
| (OD04348) | | 9060359 | |
| Kidney Cancer | 8.0 | Gastric Cancer | 11.8 |
| (OD04622-01) | | 9060395 | |
| Kidney Margin | 2.9 | Stomach Margin | 8.7 |
| (OD04622-03) | | 9060394 | |
| Kidney Cancer | 13.0 | Gastric Cancer | 7.0 |
| (OD04450-01) | | 9060397 | |
| Kidney Margin | 17.9 | Stomach Margin | 3.7 |
| (OD04450-03) | | 9060396 | |
| Kidney Cancer 8120607 | 1.9 | Gastric Cancer | 38.7 |
| | | 064005 | |

[0955] TABLE 78
Panel 3D

| | Rel. Exp. (%) Ag3195, Run | | Rel. Exp. (%) Ag3195, Run |
|---|---|---|---|
| Tissue Name | 165301766 | Tissue Name | 165301766 |
| Daoy- Medulloblastoma | 15.4 | Ca Ski- Cervical epidermoid | 40.1 |
| | | carcinoma (metastasis) | |
| TE671- Medulloblastoma | 19.5 | ES-2- Ovarian clear cell | 6.7 |
| | | carcinoma | |
| D283 Med- | 62.4 | Ramos- Stimulated with | 0.0 |
| Medulloblastoma | | PMA/ionomycin 6 h | |
| PFSK-1- Primitive | 14.9 | Ramos- Stimulated with | 1.4 |
| Neuroectodermal | | PMA/ionomycin 14 h | |
| XF-498- CNS | 42.6 | MEG-01- Chronic | 25.5 |
| | | myelogenous leukemia | |
| | | (megokaryoblast) | |
| SNB-78- Glioma | 17.3 | Raji- Burkitt's lymphoma | 3.9 |
| SF-268- Glioblastoma | 29.1 | Daudi- Burkitt's lymphoma | 7.0 |
| T98G- Glioblastoma | 16.4 | U266- B-cell plasmacytoma | 76.8 |
| SK-N-SH- | 65.1 | CA46- Burkitt's lymphoma | 9.9 |
| Neuroblastoma | | | |
| (metastasis) | | | |
| SF-295- Glioblastoma | 10.9 | RL- non-Hodgkin's B-cell | 1.3 |
| | | lymphoma | |
| Cerebellum | 83.5 | JM1- pre-B-cell lymphoma | 39.5 |
| Cerebellum | 4.7 | Jurkat- T cell leukemia | 13.3 |
| NCI-H292- | 100.0 | TF-1- Erythroleukemia | 16.6 |
| Mucoepidermoid lung | | | |
| carcinoma | | | |
| DMS-114- Small cell | 10.4 | HUT 78- T-cell lymphoma | 25.2 |
| lung cancer | | | |
| DMS-79- Small cell lung | 87.7 | U937- Histiocytic lymphoma | 43.5 |
| cancer | | | |
| NCI-H146- Small cell | 16.2 | KU-812- Myelogenous | 31.9 |
| lung cancer | | leukemia | |
| NCI-H526- Small cell | 66.4 | 769-P- Clear cell renal | 21.5 |
| lung cancer | | carcinoma | |
| NCI-N417- Small cell | 14.3 | Caki-2- Clear cell renal | 14.9 |
| lung cancer | | carcinoma | |
| NCI-H82- Small cell | 7.1 | SW 839- Clear cell renal | 18.4 |
| lung cancer | | carcinoma | |
| NCI-H157- Squamous | 0.2 | G401- Wilms' tumor | 6.9 |
| cell lung cancer | | | |
| (metastasis) | | | |
| NCI-H1155- Large cell | 34.6 | Hs766T- Pancreatic | 19.1 |
| lung cancer | | carcinoma (LN metastasis) | |
| NCI-H1299- Large cell | 16.4 | CAPAN-1- Pancreatic | 13.6 |
| lung cancer | | adenocarcinoma (liver | |
| | | metastasis) | |
| NCI-H727- Lung | 0.0 | SU86.86- Pancreatic | 7.3 |
| carcinoid | | carcinoma (liver metastasis) | |
| NCI-UMC-11- Lung | 61.6 | BxPC-3- Pancreatic | 22.7 |
| carcinoid | | adenocarcinoma | |
| LX-1- Small cell lung | 30.4 | HPAC- Pancreatic | 0.7 |
| cancer | | adenocarcinoma | |
| Colo-205- Colon cancer | 60.3 | MIA PaCa-2- Pancreatic | 0.7 |
| | | carcinoma | |
| KM12- Colon cancer | 38.2 | CFPAC-1- Pancreatic ductal | 92.0 |
| | | adenocarcinoma | |
| KM20L2- Colon cancer | 2.1 | PANC-1- Pancreatic | 20.7 |
| | | epithelioid ductal carcinoma | |
| NCI-H716- Colon cancer | 43.5 | T24- Bladder carcinma | 8.4 |
| | | (transitional cell) | |
| SW-48- Colon | 29.5 | 5637- Bladder carcinoma | 26.1 |
| adenocarcinoma | | | |
| SW1116- Colon | 6.6 | HT-1197- Bladder carcinoma | 7.0 |
| adenocarcinoma | | | |
| LS 174T- Colon | 12.1 | UM-UC-3- Bladder carcinma | 1.4 |
| adenocarcinoma | | (transitional cell) | |
| SW-948- Colon | 3.0 | A204- Rhabdomyosarcoma | 10.4 |
| adenocarcinoma | | | |
| SW-480- Colon | 8.4 | HT-1080- Fibrosarcoma | 30.1 |
| adenocarcinoma | | | |
| NCI-SNU-5- Gastric | 9.0 | MG-63- Osteosarcoma | 7.6 |
| carcinoma | | | |
| KATO III- Gastric | 46.7 | SK-LMS-1- Leiomyosarcoma | 39.2 |
| carcinoma | | (vulva) | |
| NCI-SNU-16- Gastric | 26.4 | SJRH30- Rhabdomyosarcoma | 24.5 |
| carcinoma | | (met to bone marrow) | |
| NCI-SNU-1- Gastric | 84.7 | A431- Epidermoid carcinoma | 47.0 |
| carcinoma | | | |
| RF-1- Gastric | 30.4 | WM266-4- Melanoma | 25.5 |
| adenocarcinoma | | | |
| RF-48- Gastric | 15.8 | DU 145- Prostate carcinoma | 0.0 |
| adenocarcinoma | | (brain metastasis) | |
| MKN-45- Gastric | 8.8 | MDA-MB-468- Breast | 0.9 |
| carcinoma | | adenocarcinoma | |
| NCI-N87- Gastric | 12.4 | SCC-4- Squamous cell | 0.0 |
| carcinoma | | carcinoma of tongue | |
| OVCAR-5- Ovarian | 4.5 | SCC-9- Squamous cell | 0.0 |
| carcinoma | | carcinoma of tongue | |
| RL95-2- Uterine | 2.3 | SCC-15- Squamous cell | 0.6 |
| carcinoma | | carcinoma of tongue | |
| HelaS3- Cervical | 19.8 | CAL 27- Squamous cell | 25.9 |
| adenocarcinoma | | carcinoma of tongue | |

[0956] TABLE 79
Panel 4D

| | Rel. Exp. (%) Ag3195, Run | | Rel. Exp. (%) Ag3195, Run |
|---|---|---|---|
| Tissue Name | 164530142 | Tissue Name | 164530142 |
| Secondary Th1 act | 5.7 | HUVEC IL-1beta | 1.7 |
| Secondary Th2 act | 4.6 | HUVEC IFN gamma | 4.5 |
| Secondary Tr1 act | 5.1 | HUVEC TNF alpha + IFN | 9.0 |
| | | gamma | |
| Secondary Th1 rest | 1.7 | HUVEC TNF alpha + IL4 | 3.3 |
| Secondary Th2 rest | 2.9 | HUVEC IL-11 | 1.6 |
| Secondary Tr1 rest | 4.2 | Lung Microvascular EC | 7.4 |
| | | none | |
| Primary Th1 act | 0.8 | Lung Microvascular EC | 6.9 |
| | | TNFalpha + IL-1beta | |
| Primary Th2 act | 1.5 | Microvascular Dermal EC | 11.2 |
| | | none | |
| Primary Tr1 act | 2.5 | Microsvasular Dermal EC | 6.0 |
| | | TNFalpha + IL-1beta | |
| Primary Th1 rest | 24.5 | Bronchial epithelium | 18.2 |
| | | TNFalpha + IL1beta | |
| Primary Th2 rest | 14.1 | Small airway epithelium | 6.8 |
| | | none | |
| Primary Tr1 rest | 5.2 | Small airway epithelium | 100.0 |
| | | TNFalpha + IL-1beta | |
| CD45RA CD4 | 11.6 | Coronery artery SMC rest | 2.8 |
| lymphocyte act | | | |
| CD45RO CD4 | 6.4 | Coronery artery SMC | 1.5 |
| lymphocyte act | | TNFalpha + IL-1beta | |
| CD8 lymphocyte act | 6.3 | Astrocytes rest | 2.5 |
| Secondary CD8 | 6.7 | Astrocytes TNFalpha + | 1.8 |
| lymphocyte rest | | IL-1beta | |
| Secondary CD8 | 4.9 | KU-812 (Basophil) rest | 4.6 |
| lymphocyte act | | | |
| CD4 lymphocyte none | 10.1 | KU-812 (Basophil) | 11.0 |
| | | PMA/ionomycin | |
| 2ry Th1/Th2/Tr1_anti- | 7.7 | CCD1106 (Keratinocytes) | 9.5 |
| CD95 CH11 | | none | |
| LAK cells rest | 19.2 | CCD1106 (Keratinocytes) | 10.3 |
| | | TNFalpha + IL-1beta | |
| LAK cells IL-2 | 14.2 | Liver cirrhosis | 1.6 |
| LAK cells IL-2 + IL-12 | 12.7 | Lupus kidney | 3.3 |
| LAK cells IL-2 + IFN | 20.3 | NCI-H292 none | 30.8 |
| gamma | | | |
| LAK cells IL-2 + IL-18 | 17.7 | NCI-H292 IL-4 | 26.2 |
| LAK cells | 3.9 | NCI-H292 IL-9 | 27.4 |
| PMA/ionomycin | | | |
| NK Cells IL-2 rest | 7.6 | NCI-H292 IL-13 | 14.7 |
| Two Way MLR 3 day | 17.1 | NCI-H292 IFN gamma | 22.8 |
| Two Way MLR 5 day | 5.9 | HPAEC none | 2.8 |
| Two Way MLR 7 day | 4.3 | HPAEC TNF alpha + IL-1 | 4.7 |
| | | beta | |
| PBMC rest | 3.3 | Lung fibroblast none | 3.2 |
| PBMC PWM | 27.2 | Lung fibroblast TNF alpha | 3.1 |
| | | + IL-1 beta | |
| PBMC PHA-L | 7.1 | Lung fibroblast IL-4 | 4.4 |
| Ramos (B cell) none | 1.0 | Lung fibroblast IL-9 | 4.2 |
| Ramos (B cell) | 3.7 | Lung fibroblast IL-13 | 4.7 |
| ionomycin | | | |
| B lymphocytes PWM | 23.7 | Lung fibroblast IFN | 7.5 |
| | | gamma | |
| B lymphocytes CD40L | 14.5 | Dermal fibroblast | 23.3 |
| and IL-4 | | CCD1070 rest | |
| EOL-1 dbcAMP | 14.8 | Dermal fibroblast | 38.4 |
| | | CCD1070 TNF alpha | |
| EOL-1 dbcAMP | 6.0 | Dermal fibroblast | 12.2 |
| PMA/ionomycin | | CCD1070 IL-1 beta | |
| Dendritic cells none | 13.5 | Dermal fibroblast IFN | 14.5 |
| | | gamma | |
| Dendritic cells LPS | 13.7 | Dermal fibroblast IL-4 | 19.9 |
| Dendritic cells anti- | 16.3 | IBD Colitis 2 | 1.2 |
| CD40 | | | |
| Monocytes rest | 29.9 | IBD Crohn's | 2.1 |
| Monocytes LPS | 5.3 | Colon | 11.6 |
| Macrophages rest | 11.7 | Lung | 5.8 |
| Macrophages LPS | 9.7 | Thymus | 39.8 |
| HUVEC none | 3.3 | Kidney | 31.0 |
| HUVEC starved | 9.3 | | |

[0957] AI_comprehensive panel_v1.0 Summary: Ag3195 The NOV11b gene is expressed in normal lung, bone, joint tissue, gut and skin. There is no apparent difference in transcript expression in disease tissue as compared to normal tissue. Please see Panel 4D for discussion of utility of this gene in an autoimmune context.

[0958] CNS_neurodegeneration_v1.0 Summary: Ag3195 The expression profile of the NOV11b gene shows higher expression in the temporal cortex of Alzheimer's disease victims. This gene encodes an alpha glucosidase homolog. Brain glucose regulation may play a role in Alzheimer's disease. For example, hyperglycemia may exert a deleterious effect by potentiating the neuronal death produced by pathological processes taking place, such as amyloid deposition. The category of agents that interfere with the absorption of glucose and lipids includes alpha-glucosidase inhibitors. Therefore, modulators of this gene product may be useful in the treatment of Alzheimer's disease. Data from a second experiment with probe/primer set Ag3154 is not included due to the high probability of a probe failure.

[0959] References:

[0960] Messier C, Gagnon M. Glucose regulation and cognitive functions: relation to Alzheimer's disease and diabetes. Behav Brain Res February 1996;75(1-2):1-11

[0961] Glucose has been found to improve memory in animals and humans. Animal research has revealed that glucose may improve memory through a facilitation of acetylcholine (ACh) synthesis and release in the brain. This glucose-related memory improvement has prompted research in elderly humans. These studies have shown that the memory-improving action of glucose depends on each individuals' blood glucose regulation. Based on these data, researchers have evaluated the effect of glucose on memory in patients with Alzheimer's disease (AD). Results demonstrated that glucose could improve memory in a subset of patients that had abnormalities in their blood glucose regulation. Interestingly, these alterations in blood glucose regulation were believed to depend on the severity of the disease process. Another line of investigation has focused on alterations in brain glucose metabolism. Both animal models and studies with Type II diabetic elderly patients have shown that altered glucose regulation impairs learning and memory processes. It is possible that in AD patients, hyperglycemia exerts a deleterious effect by potentiating the neuronal death produced by other pathological processes taking place such as amyloid deposition. Based on these data, it appears important to find the prevalence of altered glucoregulation at various stages of AD. Secondly, it may be of interest to determine prospectively whether altered glucoregulation is linked to a faster progression of the disease. Finally, if such a relationship is observed, the next logical step would be to determine whether AD patients could benefit from treatments aimed at normalizing blood glucose regulation and improving insulin sensitivity.

[0962] Panel 1 Summary: Ag401 The expression of the NOV11b gene appears to be highest in a sample derived from testis tissue (CT=26. 1). In addition to testis tissue, there appears to be substantial expression associated with the cerebellar region of the brain and mammary gland. The other samples in the panel show low uniform expression. Thus, the expression of this gene could be used to distinguish testis, mammary gland and cerebellum from the other samples in the panel.

[0963] Please see Panel CNS_neurodegeneration_v1.0 for discussion of potential utility of this gene in the central nervous system.

[0964] This gene is also moderately expressed in a number of metabolic tissues including pancreas, adrenal, thyroid, pituitary, heart, skeletal muscle, and adult and fetal liver. This small molecule target may be useful for the treatment of metabolic diseases, including obesity and Types 1 and 2 diabetes.

[0965] Panel 1.3D Summary: Ag401/Ag3195 Three experiments expression of the NOV11b gene in a wide variety of metabolic tissues, including pancreas, adipose, adrenal, thyroid, pituitary, adult and fetal heart, adult and fetal skeletal muscle, and adult and fetal liver. Alpha-glucosidase inhibitors are currently used in the treatment of Type 2 diabetes to decrease glucose absorption from the gut. Thus, this gene product may be a small molecule target for the treatment of metabolic diseases, including obesity and Types 1 and 2 diabetes.

[0966] Significant brain expression of the gene is also seen in this panel. Please see Panel CNS_neurodegeneration_v1.0 for discussion of potential utility of this gene in the central nervous system. Data from a second experiment with probe/primer set Ag3154 is not included due to the high probability of a probe failure.

[0967] References:

[0968] Raptis S A, Dimitriadis G D. Oral hypoglycemic agents: insulin secretagogues, alpha-glucosidase inhibitors and insulin sensitizers. Exp Clin Endocrinol Diabetes. 2001;109 Suppl 2:S265-87.

[0969] In this review we present the agents that are in use in the treatment of type 2 diabetes. Sulfonylureas of the 1st and 2nd generation increase insulin secretion but can induce hyperinsulinemia and sometimes prolonged hypoglycemia. Glimepiride is a new 3rd generation sulfonylurea with some advantages over the other members of this group, such as a lower risk of hypoglycemia, no interaction with cardiovascular KATP-channels and a possibility that it may increase insulin sensitivity. There are also newer insulin secretagogues (such as neteglinide and repaglinide) with a rapid onset of action on the beta-cell, therefore inducing a more physiological profile of insulin secretion during meals. The category of insulin sensitizers includes metformin and thiazolidinediones. Metformin effectively reduces hyperglycemia, hyperlipidemia and macroangiopathy in patients with type 2 diabetes. This agent increases the sensitivity of the liver and peripheral tissues to insulin and, therefore, it could be considered as a drug of choice for the prevention of type 2 diabetes. Thiazolidinediones (rosiglitazone and pioglitazone) increase the sensitivity of the tissues to insulin. This mechanism of action makes them powerful therapeutic tools for the treatment of type 2 diabetes (and possibly other insulin resistant states) either alone or in combination with other oral agents. The category of agents that interfere with the absorption of glucose and lipids includes alpha-glucosidase inhibitors (acarbose and miglitol) and lipase inhibitors (or-listat). alpha-Glucocidase inhibitors improve the time relationship between plasma insulin and glucose increases after a meal. Therefore, these agents may be used in the treatment of patients with type 2 diabetes, either alone at a very early stage of this disease (when insulin secretion is still adequate), or in combination with insulin secretagogues. alpha-Glucosidase inhibition may also prove useful as a supplement to insulin therapy in patients with type 1 diabetes mellitus. The inhibitor of gastrointestinal lipase orlistat may prove a useful adjunct to hypocaloric diets in patients with type 2 diabetes and obesity.

[0970] PMID: 11460577

[0971] Panel 2D Summary: Ag3195 The expression of the NOV11b gene appears to be highest in a sample of normal lung tissue adjacent to malignant lung (CT=27.4). In addition, there appears to be substantial expression in other samples of normal lung tissue, normal kidney tissue and normal colon tissue. Thus, the expresion of this gene could be used to distinguish normal lung, kidney and colon form other samples in the panel. Moreover, therapeutic modulation of this gene, through the use of small molecule drugs, antibodies or protein therapeutics might be of benefit in the treatment of lung, kidney or colon cancer.

[0972] Panel 3D Summary: Ag3195 The expression of the NOV11b gene appears to be highest in a sample derived from a lung cancer cell line(CT=29.9). In addition, there appears to be substantial expression in a number of lung cnacer cell lines' in addition to a number of other samples in this panel. Thus, the expression of this gene could be used to distinguish this lung cancer cell line derived sample from other samples in the panel.

[0973] Panel 4D Summary: Ag3191 The NOV11b transcript is expressed at high levels in small airway epithelium activated with TNFalpha and IL-1beta. It is also expressed in normal tissues such as the lung, thymus and kidney, as seen in Panel AI. The protein encoded by this transcript is related to Alpha glucosidase A. This enzyme is important in lung maturation and may contribute to surfactant phospholipid biosynthesis (see reference). Therefore, therapeutics designed with the protein encoded by this transcript or therapeutics that modulate its production could potentially be used to aid lung surfactant production in premature infants, and to treat lung injuries. Data from a second experiment with probe/primer set Ag3154 is not included due to the high probability of a probe failure.

[0974] References:

[0975] Bourbon J R, Doucet E, Rieutort M. Role of alpha-glucosidase in fetal lung maturation.Biochim Biophys Acta Jan. 13, 1987;917(1):203-10

[0976] The role of lysosomal enzyme acid alpha-glucosidase in fetal lung development was investigated with the aid of a specific inhibitor, the pseudosaccharide acarbose. The drug was added to a Waymouth culture medium of fetal rat lung explants cultivated for 48 h fromgestational stage 19.5 days, an in vitro system previously shown to allow morphological and biochemical maturation of alveolar epithelium. Glycogenolysis was reduced by 40% as compared with tissue cultivated on control medium, which means thatalpha-glucosidase could account for as much as 40% of fetal lung glycogenolysis, the remaining 60% being presumably achieved by cytosolic phosphorylase and by a microsomal neutral alpha-glucosidase. By the same time, the increase of phospholipids of surfactant fraction extracted from cultivated explants was partially inhibited: total and saturated phosphatidylcholine, phosphatidylethanolamine, phosphatidylglycerol and phosphatidylinositol were about 30-40% lower than in lungs cultivated on control medium. It should beemphasized that DNA concentration and increases in non-surfactant phospholipids were unchanged by the drug. alpha-Glucosidase activity was evidenced in the lysosomal fraction, in the microsomal fraction and, although in lower amounts, in the surfactant fraction extracted from term fetal lung. The results suggest that lysosomal alpha-glucosidase plays a major role in lung maturation and could facilitate glycogenolysis for the specific use of glycogen stores in providing substrates for surfactant phospholipid biosynthesis.

[0977] PMID: 3539207

[0978] NOV11c

[0979] Expression of gene NOV11c was assessed using the primer-probe set Ag401, described in Table 80. Results of the RTQ-PCR runs are shown in Tables 81 and 82.

TABLE 80

Probe Name Ag401

| | | | | |
|---|---|---|---|---|
| Primers | Sequences | Length | Start Position | SEQ ID NO: |

| | | | | |
|---|---|---|---|---|
| Forward | 5′-ttgtgccaaaacatccatcct-3′ | 21 | 2870 | 229 |
| Probe | TET-5′-agcctggagaagctctcactcaacattgc-3′-TAMRA | 29 | 2892 | 230 |
| Reverse | 5′-tatgatgcggacctcccagt-3′ | 20 | 2926 | 231 |

[0980] TABLE 81
Panel 1

| | Rel. Exp. (%) Ag401, | | Rel. Exp. (%) Ag401, |
|---|---|---|---|
| Tissue Name | Run 88225002 | Tissue Name | Run 88225002 |
| Endothelial cells | 1.5 | Renal ca. 786-0 | 10.7 |
| Endothelial cells | 2.5 | Renal ca. A498 | 4.2 |
| (treated) | | | |
| Pancreas | 11.0 | Renal ca. RXF 393 | 4.8 |
| Pancreatic ca. CAPAN 2 | 2.6 | Renal ca. ACHN | 4.9 |
| Adrenal gland | 8.5 | Renal ca. UO-31 | 3.8 |
| Thyroid | 13.6 | Renal ca. TK-10 | 5.0 |
| Salivary gland | 12.7 | Liver | 24.0 |
| Pituitary gland | 8.3 | Liver (fetal) | 4.0 |
| Brain (fetal) | 4.2 | Liver ca. (hepatoblast) | 7.1 |
| | | HepG2 | |
| Brain (whole) | 14.7 | Lung | 3.1 |
| Brain (amygdala) | 4.1 | Lung (fetal) | 12.9 |
| Brain (cerebellum) | 74.2 | Lung ca. (small cell) | 9.5 |
| | | LX-1 | |
| Brain (hippocampus) | 7.4 | Lung ca. (small cell) | 0.8 |
| | | NCI-H69 | |
| Brain (substantia nigra) | 13.6 | Lung ca. (s.cell var.) | 13.2 |
| | | SHP-77 | |
| Brain (thalamus) | 7.3 | Lung ca. (large | 8.5 |
| | | cell)NCI-H460 | |
| Brain (hypothalamus) | 12.6 | Lung ca. (non-sm. | 4.3 |
| | | cell) A549 | |
| Spinal cord | 12.9 | Lung ca. (non-s.cell) | 5.7 |
| | | NCI-H23 | |
| glio/astro U87-MG | 3.5 | Lung ca. (non-s.cell) | 3.7 |
| | | HOP-62 | |
| glio/astro U-118-MG | 7.6 | Lung ca. (non-s.cl) | 10.9 |
| | | NCI-H522 | |
| astrocytoma SW1783 | 2.0 | Lung ca. (squam.) SW | 8.4 |
| | | 900 | |
| neuro*; met SK-N-AS | 4.4 | Lung ca. (squam.) | 1.2 |
| | | NCI-H596 | |
| astrocytoma SF-539 | 5.6 | Mammary gland | 32.1 |
| astrocytoma SNB-75 | 5.4 | Breast ca.* (pl.ef) | 5.6 |
| | | MCF-7 | |
| glioma SNB-19 | 7.0 | Breast ca.* (pl.ef) | 3.3 |
| | | MDA-MB-231 | |
| glioma U251 | 5.5 | Breast ca.* (pl. ef) | 12.3 |
| | | T47D | |
| glioma SF-295 | 5.3 | Breast ca. BT-549 | 6.7 |
| Heart | 8.8 | Breast ca. MDA-N | 8.8 |
| Skeletal muscle | 14.6 | Ovary | 10.4 |
| Bone marrow | 9.3 | Ovarian ca. OVCAR-3 | 3.1 |
| Thymus | 27.7 | Ovarian ca. OVCAR-4 | 1.4 |
| Spleen | 14.6 | Ovarian ca. OVCAR-5 | 12.6 |
| Lymph node | 21.6 | Ovarian ca. OVCAR-8 | 3.4 |
| Colon (ascending) | 13.7 | Ovarian ca. IGROV-1 | 3.2 |
| Stomach | 20.4 | Ovarian ca. (ascites) | 8.3 |
| | | SK-OV-3 | |
| Small intestine | 17.4 | Uterus | 16.7 |
| Colon ca. SW480 | 1.5 | Placenta | 11.2 |
| Colon ca.* SW620 | 4.2 | Prostate | 12.4 |
| (SW480 met) | | | |
| Colon ca. HT29 | 1.5 | Prostate ca.* (bone | 13.1 |
| | | met) PC-3 | |
| Colon ca. HCT-116 | 5.3 | Testis | 100.0 |
| Colon ca. CaCo-2 | 3.5 | Melanoma | 12.4 |
| | | Hs688(A).T | |
| Colon ca. HCT-15 | 7.2 | Melanoma* (met) | 6.4 |
| | | Hs688(B).T | |
| Colon ca. HCC-2998 | 6.4 | Melanoma UACC-62 | 1.6 |
| Gastric ca. * (liver met) | 26.1 | Melanoma M14 | 33.9 |
| NCI-N87 | | | |
| Bladder | 4.3 | Melanoma LOX | 8.0 |
| | | IMVI | |
| Trachea | 20.9 | Melanoma* (met) SK- | 3.0 |
| | | MEL-5 | |
| Kidney | 14.9 | Melanoma SK-MEL- | 15.9 |
| | | 28 | |
| Kidney (fetal) | 17.3 | | |

[0981] TABLE 82
Panel 1.3D

| | Rel. Exp. (%) Ag401, | | Rel. Exp. (%) Ag401, |
|---|---|---|---|
| Tissue Name | Run 165518174 | Tissue Name | Run 165518174 |
| Liver adenocarcinoma | 2.9 | Kidney (fetal) | 13.8 |
| Pancreas | 10.1 | Renal ca. 786-0 | 14.8 |
| Pancreatic ca. CAPAN 2 | 10.2 | Renal ca. A498 | 13.9 |
| Adrenal gland | 16.2 | Renal ca. RXF 393 | 18.2 |
| Thyroid | 18.9 | Renal ca. ACHN | 12.7 |
| Salivary gland | 24.7 | Renal ca. UO-31 | 12.2 |
| Pituitary gland | 20.2 | Renal ca. TK-10 | 5.7 |
| Brain (fetal) | 23.5 | Liver | 16.7 |
| Brain (whole) | 52.1 | Liver (fetal) | 9.0 |
| Brain (amygdala) | 16.2 | Liver ca. | 9.6 |
| | | (hepatoblast) HepG2 | |
| Brain (cerebellum) | 47.6 | Lung | 19.5 |
| Brain (hippocampus) | 54.3 | Lung (fetal) | 11.2 |
| Brain (substantia nigra) | 20.0 | Lung ca. (small cell) | 18.7 |
| | | LX-1 | |
| Brain (thalamus) | 41.5 | Lung ca. (small cell) | 0.0 |
| | | NCI-H69 | |
| Cerebral Cortex | 15.0 | Lung ca. (s.cell var.) | 10.9 |
| | | SHP-77 | |
| Spinal cord | 38.7 | Lung ca. (large | 19.5 |
| | | cell)NCI-H460 | |
| glio/astro U87-MG | 9.5 | Lung ca. (non-sm. | 1.6 |
| | | cell) A549 | |
| glio/astro U-118-MG | 49.7 | Lung ca. (non-s.cell) | 9.3 |
| | | NCI-H23 | |
| astrocytoma SW1783 | 10.4 | Lung ca. (non-s.cell) | 17.8 |
| | | HOP-62 | |
| neuro*; met SK-N-AS | 20.2 | Lung ca. (non-s.cl) | 9.0 |
| | | NCI-H522 | |
| astrocytoma SF-539 | 25.7 | Lung ca. (squam.) | 4.5 |
| | | SW 900 | |
| astrocytoma SNB-75 | 22.4 | Lung ca. (squam.) | 3.1 |
| | | NCI-H596 | |
| glioma SNB-19 | 25.9 | Mammary gland | 27.0 |
| glioma U251 | 59.9 | Breast ca.* (pl.ef) | 4.3 |
| | | MCF-7 | |
| glioma SF-295 | 15.4 | Breast ca.* (pl.ef) | 47.3 |
| | | MDA-MB-231 | |
| Heart (fetal) | 0.5 | Breast ca.* (pl.ef) | 6.4 |
| | | T47D | |
| Heart | 14.0 | Breast ca. BT-549 | 12.9 |
| Skeletal muscle (fetal) | 7.0 | Breast ca. MDA-N | 6.2 |
| Skeletal muscle | 100.0 | Ovary | 6.3 |
| Bone marrow | 33.9 | Ovarian ca. OVCAR-3 | 10.5 |
| Thymus | 32.1 | Ovarian ca. OVCAR-4 | 7.2 |
| Spleen | 27.9 | Ovarian ca. OVCAR-5 | 13.6 |
| Lymph node | 76.8 | Ovarian ca. OVCAR-8 | 4.6 |
| Colorectal | 38.7 | Ovarian ca. IGROV-1 | 2.5 |
| Stomach | 21.0 | Ovarian ca.* (ascites) | 17.3 |
| | | SK-OV-3 | |
| Small intestine | 60.7 | Uterus | 61.6 |
| Colon ca. SW480 | 7.6 | Plancenta | 2.9 |
| Colon ca.* | 2.9 | Prostate | 17.8 |
| SW620(SW480 met) | | | |
| Colon ca. HT29 | 0.8 | Prostate ca.* (bone | 19.6 |
| | | met)PC-3 | |
| Colon ca. HCT-116 | 3.6 | Testis | 50.7 |
| Colon ca. CaCo-2 | 3.1 | Melanoma | 9.5 |
| | | Hs688(A).T | |
| Colon ca. | 7.9 | Melanoma* (met) | 15.8 |
| tissue(ODO3866) | | Hs688(B).T | |
| Colon ca. HCC-2998 | 10.3 | Melanoma UACC-62 | 7.6 |
| Gastric ca.* (liver met) | 55.1 | Melanoma M14 | 89.5 |
| NCI-N87 | | | |
| Bladder | 22.2 | Melanoma LOX | 2.2 |
| | | IMVI | |
| Trachea | 17.4 | Melanoma* (met) | 1.9 |
| | | SK-MEL-5 | |
| Kidney | 19.5 | Adipose | 15.5 |

[0982] Panel 1 Summary: Ag401 The expression of the NOV11c gene appears to be highest in a sample derived from testis tissue (CT=26.1). In addition to testis tissue, there appears to be substantial expression associated with the cerebellar region of the brain and mammary gland. The other samples in the panel show low uniform expression. Thus, the expression of this gene could be used to distinguish testis, mammary gland and cerebellum from the other samples in the panel.

[0983] This gene is also moderately expressed in a number of metabolic tissues including pancreas, adrenal, thyroid, pituitary, heart, skeletal muscle, and adult and fetal liver. This small molecule target may be useful for the treatment of metabolic diseases, including obesity and Types 1 and 2 diabetes.

[0984] Panel 1.3D Summary: Ag401 The NOV11c gene is expressed in a wide variety of metabolic tissues, including pancreas, adipose, adrenal, thyroid, pituitary, adult and fetal heart, adult and fetal skeletal muscle, and adult and fetal liver. Highest expression is seen in skeletal muscle (CT=29.7). In addition, this gene appears to be more highly expressed in adult skeletal muscle and heart (CTs=29-32) than in fetal skeletal muscle and heart (CTs=33-37). Thus, expression of this gene could be used to differentiate between the two sources of these tissues. Furthermore, alpha-glucosidase inhibitors are currently used in the treatment of Type 2 diabetes to decrease glucose absorption from the gut. Thus, this gene product may be a small molecule target for the treatment of metabolic diseases, including obesity and Types 1 and 2 diabetes.

[0985] Significant brain expression of the gene is also seen in this panel. Please see Panel CNS_neurodegeneration_v1.0 for discussion of potential utility of this gene in the central nervous system.

[0986] Data from a second experiment with probe/primer set Ag3154 is not included due to the high probability of a probe failure.

[0987] References:

[0988] Raptis S A, Dimitriadis G D. Oral hypoglycemic agents: insulin secretagogues, alpha-glucosidase inhibitors and insulin sensitizers. Exp Clin Endocrinol Diabetes. 2001;109 Suppl 2:S265-87.

[0989] In this review we present the agents that are in use in the treatment of type 2 diabetes. Sulfonylureas of the 1st and 2nd generation increase insulin secretion but can induce hyperinsulinemia and sometimes prolonged hypoglycemia. Glimepiride is a new 3rd generation sulfonylurea with some advantages over the other members of this group, such as a lower risk of hypoglycemia, no interaction with cardiovascular KATP-channels and a possibility that it may increase insulin sensitivity. There are also newer insulin secretagogues (such as neteglinide and repaglinide) with a rapid onset of action on the beta-cell, therefore inducing a more physiological profile of insulin secretion during meals. The category of insulin sensitizers includes metformin and thiazolidinediones. Metformin effectively reduces hyperglycemia, hyperlipidemia and macroangiopathy in patients with type 2 diabetes. This agent increases the sensitivity of the liver and peripheral tissues to insulin and, therefore, it could be considered as a drug of choice for the prevention of type 2 diabetes. Thiazolidinediones (rosiglitazone and pioglitazone) increase the sensitivity of the tissues to insulin. This mechanism of action makes them powerful therapeutic tools for the treatment of type 2 diabetes (and possibly other insulin resistant states) either alone or in combination with other oral agents. The category of agents that interfere with the absorption of glucose and lipids includes alpha-glucosidase inhibitors (acarbose and miglitol) and lipase inhibitors (or-listat). alpha-Glucocidase inhibitors improve the time relationship between plasma insulin and glucose increases after a meal. Therefore, these agents may be used in the treatment of patients with type 2 diabetes, either alone at a very early stage of this disease (when insulin secretion is still adequate), or in combination with insulin secretagogues. alpha-Glucosidase inhibition may also prove useful as a supplement to insulin therapy in patients with type 1 diabetes mellitus. The inhibitor of gastrointestinal lipase orlistat may prove a useful adjunct to hypocaloric diets in patients with type 2 diabetes and obesity.

[0990] PMID: 11460577

[0991] NOV11d

[0992] Expression of gene NOV11d was assessed using the primer-probe sets Ag3195 and Ag401, described in Tables 83 and 84. Results of the RTQ-PCR runs are shown in Tables 85, 86, 87, 88, 89, 90 and 91.

TABLE 83
Probe Name Ag3195

| Primers | Sequences | Length | Start Position | SEQ ID NO: |
|---|---|---|---|---|
| Forward | 5′aatagttttgctgaccagagg-3′ | 21 | 2623 | 232 |
| Probe | TET-5′cccagcaagtgtgtggtggag-3′-TAMRA | 21 | 2653 | 233 |
| Reverse | 5′tgatctttaccatcagatgagt-3′ | 22 | 2723 | 234 |

[0993] TABLE 84
Probe Name Ag401

| Primers | Sequences | Length | Start Position | SEQ ID NO: |
|---|---|---|---|---|
| Forward | 5′ttgtgccaaaacatccatcct-3′ | 21 | 2763 | 235 |
| Probe | TET-5′agcctggagaagctctcactcaacattgc-3′-TAMRA | 29 | 2785 | 236 |
| Reverse | 5′-tatgatgcggacctcccagt-3′ | 20 | 2819 | 237 |

[0994] TABLE 85
A1_comprehensive panel_v1.0

| | Rel. Exp. (%) Ag3195, Run | | Rel. Exp. (%) Ag3195, Run |
|---|---|---|---|
| Tissue Name | 225147682 | Tissue Name | 225147682 |
| 110967 COPD-F | 17.3 | 112427 Match Control | 66.9 |
| | | Psoriasis-F | |
| 110980 COPD-F | 15.3 | 112418 Psoriasis-M | 14.2 |
| 110968 COPD-M | 14.4 | 112723 Match Control | 4.0 |
| | | Psoriasis-M | |
| 110977 COPD-M | 37.1 | 112419 Psoriasis-M | 19.5 |
| 110989 Emphysema-F | 29.1 | 112424 Match Control | 13.7 |
| | | Psoriasis-M | |
| 110992 Emphysema-F | 11.3 | 112420 Psoriasis-M | 59.0 |
| 110993 Emphysema-F | 9.9 | 112425 Match Control | 57.8 |
| | | Psoriasis-M | |
| 110994 Emphysema-F | 9.3 | 104689 (MF) OA | 33.4 |
| | | Bone-Backus | |
| 110995 Emphysema-F | 25.3 | 104690 (MF) Adj | 22.4 |
| | | “Normal” Bone-Backus | |
| 110996 Emphysema-F | 3.2 | 104691 (MF) OA | 28.5 |
| | | Synovium-Backus | |
| 110997 Asthma-M | 4.8 | 104692 (BA) OA | 14.8 |
| | | Cartilage-Backus | |
| 111001 Asthma-F | 18.8 | 104694 (BA) OA | 22.1 |
| | | Bone-Backus | |
| 111002 Asthma-F | 13.6 | 104695 (BA) Adj | 27.0 |
| | | “Normal” Bone-Backus | |
| 111003 Atopic | 14.6 | 104696 (BA) OA | 15.5 |
| Asthma-F | | Synovium-Backus | |
| 111004 Atopic | 21.5 | 104700 (SS) OA Bone- | 16.6 |
| Asthma-F | | Backus | |
| 111005 Atopic | 14.5 | 104701 (SS) Adj | 16.5 |
| Asthma-F | | “Normal” Bone-Backus | |
| 111006 Atopic | 2.1 | 104702 (SS) OA | 29.1 |
| Asthma-F | | Synovium-Backus | |
| 111417 Allergy-M | 12.2 | 117093 OA Cartilage | 33.0 |
| | | Rep7 | |
| 112347 Allergy-M | 0.0 | 112672 OA Bone5 | 19.2 |
| 112349 Normal Lung-F | 0.0 | 112673 OA Synovium5 | 11.0 |
| 112357 Normal Lung-F | 11.6 | 112674 OA Synovial | 8.1 |
| | | Fluid cells5 | |
| 112354 Normal Lung-M | 14.9 | 117100 OA Cartilage | 5.0 |
| | | Rep14 | |
| 112374 Crohns-F | 18.6 | 112756 OA Bone9 | 5.4 |
| 112389 Match | 15.7 | 112757 OA Synovium9 | 25.7 |
| Control Crohns-F | | | |
| 112375 Crohns-F | 16.8 | 112758 OA Synovial | 15.6 |
| | | Fluid Cells9 | |
| 112732 Match | 20.4 | 117125 RA Cartilage | 19.1 |
| Control Crohns-F | | Rep2 | |
| 112725 Crohns-M | 3.8 | 113492 Bone2 RA | 26.8 |
| 112387 Match | 15.7 | 113493 Synovium2 RA | 8.9 |
| Control Crohns-M | | | |
| 112378 Crohns-M | 0.0 | 113494 Syn Fluid Cells | 19.5 |
| | | RA | |
| 112390 Match | 100.0 | 113499 Cartilage4 RA | 19.8 |
| Control Crohns-M | | | |
| 112726 Crohns-M | 23.0 | 113500 Bone4 RA | 27.9 |
| 112731 Match | 14.1 | 113501 Synovium4 RA | 19.2 |
| Control Crohns-M | | | |
| 112380 Ulcer Col-F | 41.8 | 113502 Syn Fluid | 13.6 |
| | | Cells4 RA | |
| 112734 Match | 46.7 | 113495 Cartilage3 RA | 17.2 |
| Control Ulcer Col-F | | | |
| 112384 Ulcer Col-F | 51.4 | 113496 Bone3 RA | 19.9 |
| 112737 Match | 6.5 | 113497 Synovium3 RA | 9.8 |
| Control Ulcer Col-F | | | |
| 112386 Ulcer Col-F | 10.4 | 113498 Syn Fluid | 25.2 |
| | | Cells3 RA | |
| 112738 Match | 4.5 | 117106 Normal | 6.2 |
| Control Ulcer Col-F | | Cartilage Rep20 | |
| 112381 Ulcer Col-M | 0.0 | 113663 Bone3 Normal | 0.0 |
| 112735 Match | 7.4 | 113664 Synovium3 | 0.0 |
| Control Ulcer Col-M | | Normal | |
| 112382 Ulcer Col-M | 11.3 | 113665 Syn Fluid | 0.0 |
| | | Cells3 Normal | |
| 112394 Match | 6.4 | 117107 Normal | 8.1 |
| Control Ulcer Col-M | | Cartilage Rep22 | |
| 112383 Ulcer Col-M | 21.2 | 113667 Bone4 Normal | 11.0 |
| 112736 Match | 9.6 | 113668 Synovium4 | 15.7 |
| Control Ulcer Col-M | | Normal | |
| 112423 Psoriasis-F | 17.9 | 113669 Syn Fluid | 18.0 |
| | | Cells4 Normal | |

[0995] TABLE 86
CNS_neurodegeneration_v1.0

| | Rel. Exp. (%) Ag3195, | | Rel. Exp. (%) Ag3195, |
|---|---|---|---|
| Tissue Name | Run 209859542 | Tissue Name | Run 209859542 |
| AD 1 Hippo | 16.6 | Control (Path) 3 | 6.5 |
| | | Temporal Ctx | |
| AD 2 Hippo | 31.0 | Control (Path) 4 | 34.4 |
| | | Temporal Ctx | |
| AD 3 Hippo | 6.8 | AD 1 Occipital Ctx | 14.0 |
| AD 4 Hippo | 8.7 | AD 2 Occipital Ctx | 0.0 |
| | | (Missing) | |
| AD 5 hippo | 60.7 | AD 3 Occipital Ctx | 13.1 |
| AD 6 Hippo | 63.7 | AD 4 Occipital Ctx | 29.1 |
| Control 2 Hippo | 32.1 | AD 5 Occipital Ctx | 19.6 |
| Control 4 Hippo | 17.6 | AD 6 Occipital Ctx | 26.8 |
| Control (Path) 3 | 12.8 | Control 1 Occipital | 3.3 |
| Hippo | | Ctx | |
| AD 1 Temporal Ctx | 35.6 | Control 2 Occipital | 51.1 |
| | | Ctx | |
| AD 2 Temporal Ctx | 37.1 | Control 3 Occipital | 15.3 |
| | | Ctx | |
| AD 3 Temporal Ctx | 7.9 | Control 4 Occipital | 12.8 |
| | | Ctx | |
| AD 4 Temporal Ctx | 32.8 | Control (Path) 1 | 100.0 |
| | | Occipital Ctx | |
| AD 5 Inf Temporal | 95.9 | Control (Path) 2 | 16.4 |
| Ctx | | Occipital Ctx | |
| AD 5 SupTemporal | 56.3 | Control (Path) 3 | 8.4 |
| Ctx | | Occipital Ctx | |
| AD 6 Inf Temporal | 90.8 | Control (Path) 4 | 17.4 |
| Ctx | | Occipital Ctx | |
| AD 6 Sup Temporal | 68.8 | Control 1 Parietal | 8.4 |
| Ctx | | Ctx | |
| Control 1 Temporal | 4.9 | Control 2 Parietal | 57.8 |
| Ctx | | Ctx | |
| Control 2 Temporal | 33.7 | Control 3 Parietal | 14.4 |
| Ctx | | Ctx | |
| Control 3 Temporal | 14.1 | Control (Path) 1 | 63.7 |
| Ctx | | Parietal Ctx | |
| Control 4 Temporal | 9.4 | Control (Path) 2 | 28.7 |
| Ctx | | Parietal Ctx | |
| Control (Path) 1 | 49.0 | Control (Path) 3 | 3.6 |
| Temporal Ctx | | Parietal Ctx | |
| Control (Path) 2 | 32.1 | Control (Path) 4 | 56.3 |
| Temporal Ctx | | Parietal Ctx | |

[0996] TABLE 87
Panel 1

| | Rel. Exp. (%) Ag401, | | Rel. Exp. (%) Ag401, |
|---|---|---|---|
| Tissue Name | Run 88225002 | Tissue Name | Run 88225002 |
| Endothelial cells | 1.5 | Renal ca. 786-0 | 10.7 |
| Endothelial cells | 2.5 | Renal ca. A498 | 4.2 |
| (treated) | | | |
| Pancreas | 11.0 | Renal ca. RXF 393 | 4.8 |
| Pancreatic ca. CAPAN | 2.6 | Renal ca. ACHN | 4.9 |
| 2 | | | |
| Adrenal gland | 8.5 | Renal ca. UO-31 | 3.8 |
| Thyroid | 13.6 | Renal ca. TK-10 | 5.0 |
| Salivary gland | 12.7 | Liver | 24.0 |
| Pituitary gland | 8.3 | Liver (fetal) | 4.0 |
| Brain (fetal) | 4.2 | Liver ca. (hepatoblast) | 7.1 |
| | | HepG2 | |
| Brain (whole) | 14.7 | Lung | 3.1 |
| Brain (amygdala) | 4.1 | Lung (fetal) | 12.9 |
| Brain (cerebellum) | 74.2 | Lung ca. (small cell) | 9.5 |
| | | LX-1 | |
| Brain (hippocampus) | 7.4 | Lung ca. (small cell) | 0.8 |
| | | NCI-H69 | |
| Brain (substantia nigra) | 13.6 | Lung ca. (s.cell var.) | 13.2 |
| | | SHP-77 | |
| Brain (thalamus) | 7.3 | Lung ca. (large | 8.5 |
| | | cell)NCI-H460 | |
| Brain (hypothalamus) | 12.6 | Lung ca. (non-sm. | 4.3 |
| | | cell) A549 | |
| Spinal cord | 12.9 | Lung ca. (non-s.cell) | 5.7 |
| | | NCI-H23 | |
| glio/astro U87-MG | 3.5 | Lung ca. (non-s.cell) | 3.7 |
| | | HOP-62 | |
| glio/astro U-118-MG | 7.6 | Lung ca. (non-s.cl) | 10.9 |
| | | NCI-H522 | |
| astrocytoma SW1783 | 2.0 | Lung ca. (squam.) SW | 8.4 |
| | | 900 | |
| neuro*; met SK-N-AS | 4.4 | Lung ca. (squam.) | 1.2 |
| | | NCI-H596 | |
| astrocytoma SF-539 | 5.6 | Mammary gland | 32.1 |
| astrocytoma SNB-75 | 5.4 | Breast ca.* (pl.ef) | 5.6 |
| | | MCF-7 | |
| glioma SNB-19 | 7.0 | Breast ca.* (pl. ef) | 3.3 |
| | | MDA-MB-231 | |
| glioma U251 | 5.5 | Breast ca.* (pl. ef) | 12.3 |
| | | T47D | |
| glioma SF-295 | 5.3 | Breast ca. BT-549 | 6.7 |
| Heart | 8.8 | Breast ca. MDA-N | 8.8 |
| Skeletal muscle | 14.6 | Ovary | 10.4 |
| Bone marrow | 9.3 | Ovarian ca. OVCAR-3 | 3.1 |
| Thymus | 27.7 | Ovarian ca. OVCAR-4 | 1.4 |
| Spleen | 14.6 | Ovarian ca. OVCAR-5 | 12.6 |
| Lymph node | 21.6 | Ovarian ca. OVCAR-8 | 3.4 |
| Colon (ascending) | 13.7 | Ovarian ca. IGROV-1 | 3.2 |
| Stomach | 20.4 | Ovarian ca. (ascites) | 8.3 |
| | | SK-OV-3 | |
| Small intestine | 17.4 | Uterus | 16.7 |
| Colon ca. SW480 | 1.5 | Placenta | 11.2 |
| Colon ca.* SW620 | 4.2 | Prostate | 12.4 |
| (SW480 met) | | | |
| Colon ca. HT29 | 1.5 | Prostate ca.* (bone | 13.1 |
| | | met) PC-3 | |
| Colon ca. HCT-116 | 5.3 | Testis | 100.0 |
| Colon ca. CaCo-2 | 3.5 | Melanoma | 12.4 |
| | | Hs688(A).T | |
| Colon ca. HCT-15 | 7.2 | Melanoma* (met) | 6.4 |
| | | Hs688(B).T | |
| Colon ca. HCC-2998 | 6.4 | Melanoma UACC-62 | 1.6 |
| Gastric ca. * (liver met) | 26.1 | Melanoma M14 | 33.9 |
| NCI-N87 | | | |
| Bladder | 4.3 | Melanoma LOX | 8.0 |
| | | IMVI | |
| Trachea | 20.9 | Melanoma* (met) SK- | 3.0 |
| | | MEL-5 | |
| Kidney | 14.9 | Melanoma SK-MEL- | 15.9 |
| | | 28 | |
| Kidney (fetal) | 17.3 | | |

[0997] TABLE 88
Panel 1.3D

| | Rel. | Rel. | Rel. | | Rel. | Rel. | Rel. |
|---|---|---|---|---|---|---|---|
| | Exp. (%) | Exp. (%) | Exp. (%) | | Exp. (%) | Exp. (%) | Exp. (%) |
| | Ag3195, | Ag3195, | Ag401, | | Ag3195, | Ag3195, | Ag401, |
| | Run | Run | Run | | Run | Run | Run |
| | 16552493 | 16567539 | 16551817 | Tissue | 16552493 | 16567539 | 16551817 |
| Tissue Name | 0 | 1 | 4 | Name | 0 | 1 | 4 |
| Liver | 9.0 | 3.3 | 2.9 | Kidney | 13.9 | 7.2 | 13.8 |
| adenocarcinoma | | | | (fetal) | | | |
| Pancreas | 19.5 | 10.0 | 10.1 | Renal ca. | 14.5 | 7.7 | 14.8 |
| | | | | 786-0 | | | |
| Pancreatic ca. | 0.6 | 0.0 | 10.2 | Renal ca. | 9.9 | 13.9 | 13.9 |
| CAPAN 2 | | | | A498 | | | |
| Adrenal gland | 12.9 | 8.2 | 16.2 | Renal ca. | 10.7 | 9.4 | 18.2 |
| | | | | RXF 393 | | | |
| Thyroid | 14.3 | 11.3 | 18.9 | Renal ca. | 3.6 | 4.1 | 12.7 |
| | | | | ACHN | | | |
| Salivary gland | 11.8 | 15.6 | 24.7 | Renal ca. | 1.8 | 3.1 | 12.2 |
| | | | | UO-31 | | | |
| Pituitary gland | 11.0 | 7.0 | 20.2 | Renal ca. | 3.4 | 3.2 | 5.7 |
| | | | | TK-10 | | | |
| Brain (fetal) | 13.3 | 13.9 | 23.5 | Liver | 21.5 | 16.2 | 16.7 |
| Brain (whole) | 51.4 | 36.3 | 52.1 | Liver (fetal) | 8.8 | 13.8 | 9.0 |
| Brain | 39.5 | 29.7 | 16.2 | Liver ca. | 6.6 | 15.4 | 9.6 |
| (amygdala) | | | | (hepatoblast) | | | |
| | | | | HepG2 | | | |
| Brain | 26.4 | 27.2 | 47.6 | Lung | 26.2 | 47.6 | 19.5 |
| (cerebellum) | | | | | | | |
| Brain | 39.8 | 22.7 | 54.3 | Lung (fetal) | 25.3 | 62.0 | 11.2 |
| (hippocampus) | | | | | | | |
| Brain | 26.6 | 22.2 | 20.0 | Lung ca. | 11.1 | 14.1 | 18.7 |
| (substantia | | | | (small cell) | | | |
| nigra) | | | | LX-1 | | | |
| Brain | 46.3 | 27.0 | 41.5 | Lung ca. | 0.4 | 0.0 | 0.0 |
| (thalamus) | | | | (small cell) | | | |
| | | | | NCI-H69 | | | |
| Cerebral Cortex | 5.0 | 8.2 | 15.0 | Lung ca. | 6.3 | 10.7 | 10.9 |
| | | | | (s.cell var.) | | | |
| | | | | SHP-77 | | | |
| Spinal cord | 46.3 | 38.7 | 38.7 | Lung ca. | 13.5 | 18.0 | 19.5 |
| | | | | (large | | | |
| | | | | cell) NCI- | | | |
| | | | | H460 | | | |
| glio/astro U87- | 2.4 | 1.6 | 9.5 | Lung ca. | 0.8 | 1.8 | 1.6 |
| MG | | | | (non-sm. | | | |
| | | | | cell) A549 | | | |
| glio/astro U- | 28.9 | 29.3 | 49.7 | Lung ca. | 5.1 | 3.2 | 9.3 |
| 118-MG | | | | (non-s.cell) | | | |
| | | | | NCI-H23 | | | |
| astrocytoma | 8.2 | 10.9 | 10.4 | Lung ca. | 19.2 | 7.6 | 17.8 |
| SW1783 | | | | (non-s.cell) | | | |
| | | | | HOP-62 | | | |
| neuro*; met SK- | 11.7 | 6.3 | 20.2 | Lung ca. | 2.2 | 2.9 | 9.0 |
| N-AS | | | | (non-s.cl) | | | |
| | | | | NCI-H522 | | | |
| astrocytoma SF- | 16.4 | 9.2 | 25.7 | Lung ca. | 8.1 | 6.5 | 4.5 |
| 539 | | | | (squam.) | | | |
| | | | | SW 900 | | | |
| astrocytoma | 8.3 | 14.5 | 22.4 | Lung ca. | 0.0 | 1.6 | 3.1 |
| SNB-75 | | | | (squam.) | | | |
| | | | | NCI-H596 | | | |
| glioma SNB-19 | 3.2 | 5.5 | 25.9 | Mammary | 44.1 | 22.1 | 27.0 |
| | | | | gland | | | |
| glioma U251 | 26.6 | 20.3 | 59.9 | Breast ca.* | 4.4 | 1.7 | 4.3 |
| | | | | (pl.ef) | | | |
| | | | | NCF-7 | | | |
| glioma SF-295 | 10.1 | 5.5 | 15.4 | Breast ca.* | 21.0 | 15.4 | 47.3 |
| | | | | (pl.ef) | | | |
| | | | | MDA-MB- | | | |
| | | | | 231 | | | |
| Heart (fetal) | 1.9 | 2.5 | 0.5 | Breast ca.* | 3.1 | 4.9 | 6.4 |
| | | | | (pl.ef) | | | |
| | | | | T47D | | | |
| Heart | 8.0 | 15.2 | 14.0 | Breast ca. | 12.5 | 7.3 | 12.9 |
| | | | | BT-549 | | | |
| Skeletal muscle | 2.9 | 1.8 | 7.0 | Breast ca. | 4.4 | 1.9 | 6.2 |
| (fetal) | | | | MDA-N | | | |
| Skeletal muscle | 57.0 | 58.2 | 100.00 | Ovary | 10.9 | 6.5 | 6.3 |
| Bone marrow | 28.1 | 13.0 | 33.9 | Ovarian ca. | 8.4 | 6.3 | 10.5 |
| | | | | OVCAR-3 | | | |
| Thymus | 27.2 | 16.0 | 32.1 | Ovarian ca. | 3.6 | 2.9 | 7.2 |
| | | | | OVCAR-4 | | | |
| Spleen | 39.0 | 27.0 | 27.9 | Ovarian ca. | 11.2 | 9.2 | 13.6 |
| | | | | OVCAR-5 | | | |
| Lymph node | 100.0 | 100.0 | 76.8 | Ovarian ca. | 3.9 | 4.5 | 4.6 |
| | | | | OVCAR-8 | | | |
| Colorectal | 25.0 | 23.2 | 38.7 | Ovarian ca. | 16.3 | 1.6 | 2.5 |
| | | | | IRGOV-1 | | | |
| Stomach | 23.3 | 25.3 | 21.0 | Ovarian | 10.1 | 11.6 | 17.3 |
| | | | | ca.* | | | |
| | | | | (ascites) | | | |
| | | | | SK-OV-3 | | | |
| Small intestine | 55.9 | 41.8 | 60.7 | Uterus | 65.5 | 61.1 | 61.6 |
| Colon ca. | 5.6 | 2.9 | 7.6 | Plancenta | 6.6 | 10.2 | 2.9 |
| SW480 | | | | | | | |
| Colon ca.* | 6.7 | 4.9 | 2.9 | Prostate | 14.8 | 8.5 | 17.8 |
| SW620(SW480 | | | | | | | |
| met) | | | | | | | |
| Colon ca. HT29 | 2.8 | 1.1 | 0.8 | Prostate | 3.5 | 6.9 | 19.6 |
| | | | | ca.* (bone | | | |
| | | | | met) PC-3 | | | |
| Colon ca. HCT- | 4.5 | 3.2 | 3.6 | Testis | 45.1 | 23.8 | 50.7 |
| 116 | | | | | | | |
| Colon ca. | 2.0 | 2.0 | 3.1 | Melanoma | 7.2 | 3.7 | 9.5 |
| CaCo-2 | | | | Hs688(A).T | | | |
| Colon ca. | 14.5 | 5.8 | 7.9 | Melanoma* | 10.0 | 6.7 | 15.8 |
| tissue(ODO3866) | | | | (met) | | | |
| | | | | Hs688(B).T | | | |
| Colon ca. HCC- | 6.4 | 4.6 | 10.3 | Melanoma | 16.5 | 12.5 | 7.6 |
| 2998 | | | | UACC-62 | | | |
| Gastric ca.* | 48.0 | 34.9 | 55.1 | Melanoma | 73.7 | 51.8 | 89.5 |
| (liver met) NCI- | | | | M14 | | | |
| N87 | | | | | | | |
| Bladder | 21.3 | 23.3 | 22.2 | Melanoma | 1.1 | 0.6 | 2.2 |
| | | | | LOX IMVI | | | |
| Trachea | 21.5 | 26.1 | 17.4 | Melanoma* | 0.4 | 1.7 | 1.9 |
| | | | | (met) SK- | | | |
| | | | | MEL-5 | | | |
| Kidney | 44.8 | 35.8 | 19.5 | Adipose | 22.1 | 9.9 | 15.5 |

[0998] TABLE 89
Panel 2D

| | Rel. Exp. (%) Ag3195, Run | | Rel. Exp. (%) Ag3195, Run |
|---|---|---|---|
| Tissue Name | 165003127 | Tissue Name | 165003127 |
| Normal Colon | 51.1 | Kidney Margin | 1.4 |
| | | 8120608 | |
| CC Well to Mod Diff | 6.9 | Kidney Cancer | 2.5 |
| (ODO3866) | | 8120613 | |
| CC Margin (ODO3866) | 5.9 | Kidney Margin | 6.7 |
| | | 8120614 | |
| CC Gr.2 rectosigmoid | 4.3 | Kidney Cancer | 9.0 |
| (ODO3868) | | 9010320 | |
| CC Margin (ODO3868) | 2.4 | Kidney Margin | 15.5 |
| | | 9010321 | |
| CC Mod Diff (ODO3920) | 6.4 | Normal Uterus | 5.9 |
| CC Margin (ODO3920) | 12.6 | Uterus Cancer 064011 | 31.9 |
| CC Gr.2 ascend colon | 24.3 | Normal Thyroid | 10.2 |
| (ODO3921) | | | |
| CC Margin (ODO3921) | 9.2 | Thyroid Cancer | 12.5 |
| | | 064010 | |
| CC from Partial | 22.8 | Thyroid Cancer | 16.2 |
| Hepatectomy (ODO4309) | | A302152 | |
| Mets | | | |
| Liver Margin (ODO4309) | 14.7 | Thyroid Margin | 18.9 |
| | | A302153 | |
| Colon mets to lung | 3.5 | Normal Breast | 24.8 |
| (OD04451-01) | | | |
| Lung Margin (OD04451- | 7.1 | Breast Cancer | 5.8 |
| 02) | | (OD04566) | |
| Normal Prostate 6546-1 | 25.5 | Breast Cancer | 16.0 |
| | | (OD04590-01) | |
| Prostate Cancer | 10.6 | Breast Cancer Mets | 28.9 |
| (OD04410) | | (OD04590-03) | |
| Prostate Margin | 9.4 | Breast Cancer | 7.9 |
| (OD04410) | | Metastasis | |
| | | (OD04655-05) | |
| Prostate Cancer | 15.2 | Breast Cancer 064006 | 10.4 |
| (OD04720-01) | | | |
| Prostate Margin | 24.0 | Breast Cancer 1024 | 10.7 |
| (OD04720-02) | | | |
| Normal Lung 061010 | 100.0 | Breast Cancer | 7.2 |
| | | 9100266 | |
| Lung Met to Muscle | 5.3 | Breast Margin | 7.2 |
| (ODO4286) | | 9100265 | |
| Muscle Margin | 13.7 | Breast Cancer | 17.2 |
| (ODO4286) | | A209073 | |
| Lung Malignant Cancer | 24.0 | Breast Margin | 12.2 |
| (OD03126) | | A2090734 | |
| Lung Margin (OD03126) | 74.7 | Normal Liver | 27.0 |
| Lung Cancer (OD04404) | 14.0 | Liver Cancer 064003 | 45.7 |
| Lung Margin (OD04404) | 18.9 | Liver Cancer 1025 | 8.6 |
| Lung Cancer (OD04565) | 8.0 | Liver Cancer 1026 | 1.8 |
| Lung Margin (OD04565) | 16.7 | Liver Cancer 6004-T | 0.7 |
| Lung Cancer (OD04237- | 23.8 | Liver Tissue 6004-N | 6.0 |
| 01) | | | |
| Lung Margin (OD04237- | 17.3 | Liver Cancer 6005-T | 1.7 |
| 02) | | | |
| Ocular Mel Met to Liver | 19.3 | Liver Tissue 6005-N | 1.5 |
| (ODO4310) | | | |
| Liver Margin (ODO4310) | 14.3 | Normal Bladder | 35.6 |
| Melanoma Mets to Lung | 7.6 | Bladder Cancer 1023 | 3.2 |
| (OD04321) | | | |
| Lung Margin (OD04321) | 40.3 | Bladder Cancer | 15.7 |
| | | A302173 | |
| Normal Kidney | 87.7 | Bladder Cancer | 6.7 |
| | | (OD04718-01) | |
| Kidney Ca, Nuclear grade | 28.9 | Bladder Normal | 21.6 |
| 2 (OD04338) | | Adjacent (OD04718- | |
| | | 03) | |
| Kidney Margin | 25.2 | Normal Ovary | 3.7 |
| (OD04338) | | | |
| Kidney Ca Nuclear grade | 34.4 | Ovarian Cancer | 11.3 |
| 1/2 (OD04339) | | 064008 | |
| Kidney Margin | 35.6 | Ovarian Cancer | 25.0 |
| (OD04339) | | (OD04768-07) | |
| Kidney Ca, Clear cell | 20.9 | Ovary Margin | 3.7 |
| type (OD04340) | | (OD04768-08) | |
| Kidney Margin | 34.2 | Normal Stomach | 18.4 |
| (OD04340) | | | |
| Kidney Ca, Nuclear grade | 7.7 | Gastric Cancer | 4.0 |
| 3 (OD04348) | | 9060358 | |
| Kidney Margin | 28.5 | Stomach Margin | 8.2 |
| (OD04348) | | 9060359 | |
| Kidney Cancer | 8.0 | Gastric Cancer | 11.8 |
| (OD04622-01) | | 9060395 | |
| Kidney Margin | 2.9 | Stomach Margin | 8.7 |
| (OD04622-03) | | 9060394 | |
| Kidney Cancer | 13.0 | Gastric Cancer | 7.0 |
| (OD04450-01) | | 9060397 | |
| Kidney Margin | 17.9 | Stomach Margin | 3.7 |
| (OD04450-03) | | 9060396 | |
| Kidney Cancer 8120607 | 1.9 | Gastric Cancer | 38.7 |
| | | 064005 | |

[0999] TABLE 90
Panel 3D

| | Rel. Exp. (%) Ag3195, Run | | Rel. Exp. (%) Ag3195, Run |
|---|---|---|---|
| Tissue Name | 165301766 | Tissue Name | 165301766 |
| Daoy- Medulloblastoma | 15.4 | Ca Ski- Cervical epidermoid | 40.1 |
| | | carcinoma (metastasis) | |
| TE671- Medulloblastoma | 19.5 | ES-2- Ovarian clear cell | 6.7 |
| | | carcinoma | |
| D283 Med- | 62.4 | Ramos- Stimulated with | 0.0 |
| Medulloblastoma | | PMA/ionomycin 6 h | |
| PFSK-1- Primitive | 14.9 | Ramos- Stimulated with | 1.4 |
| Neuroectodermal | | PMA/ionomycin 14 h | |
| XF-498- CNS | 42.6 | MEG-01- Chronic | 25.5 |
| | | myelogenous leukemia | |
| | | (megokaryoblast) | |
| SNB-78- Glioma | 17.3 | Raji- Burkitt's lymphoma | 3.9 |
| SF-268- Glioblastoma | 29.1 | Daudi- Burkitt's lymphoma | 7.0 |
| T98G- Glioblastoma | 16.4 | U266- B-cell plasmacytoma | 76.8 |
| SK-N-SH- | 65.1 | CA46- Burkitt's lymphoma | 9.9 |
| Neuroblastoma | | | |
| (metastasis) | | | |
| SF-295- Glioblastoma | 10.9 | RL- non-Hodgkin's B-cell | 1.3 |
| | | lymphoma | |
| Cerebellum | 83.5 | JM1- pre-B-cell lymphoma | 39.5 |
| Cerebellum | 4.7 | Jurkat- T cell leukemia | 13.3 |
| NCI-H292- | 100.0 | TF-1- Erythroleukemia | 16.6 |
| Mucoepidermoid lung | | | |
| carcinoma | | | |
| DMS-114- Small cell | 10.4 | HUT 78- T-cell lymphoma | 25.2 |
| lung cancer | | | |
| DMS-79- Small cell lung | 87.7 | U937- Histiocytic lymphoma | 43.5 |
| cancer | | | |
| NCI-H146- Small cell | 16.2 | KU-812- Myelogenous | 31.9 |
| lung cancer | | leukemia | |
| NCI-H526- Small cell | 66.4 | 769-P- Clear cell renal | 21.5 |
| lung cancer | | carcinoma | |
| NCI-N417- Small cell | 14.3 | Caki-2- Clear cell renal | 14.9 |
| lung cancer | | carcinoma | |
| NCI-H82- Small cell | 7.1 | SW 839- Clear cell renal | 18.4 |
| lung cancer | | carcinoma | |
| NCI-H157- Squamous | 0.2 | G401- Wilms' tumor | 6.9 |
| cell lung cancer | | | |
| (metastasis) | | | |
| NCI-H1155- Large cell | 34.6 | Hs766T- Pancreatic | 19.1 |
| lung cancer | | carcinoma (LN metastasis) | |
| NCI-H1299- Large cell | 16.4 | CAPAN-1- Pancreatic | 13.6 |
| lung cancer | | adenocarcinoma (liver | |
| | | metastasis) | |
| NCI-H727- Lung | 0.0 | SU86.86- Pancreatic | 7.3 |
| carcinoid | | carcinoma (liver metastasis) | |
| NCI-UMC-11- Lung | 61.6 | BxPc-3- Pancreatic | 22.7 |
| carcinoid | | adenocarcinoma | |
| LX-1- Small cell lung | 30.4 | HPAC- Pancreatic | 0.7 |
| cancer | | adenocarcinoma | |
| Colo-205- Colon cancer | 60.3 | MIA PaCa-2- Pancreatic | 0.7 |
| | | carcinoma | |
| KM12- Colon cancer | 38.2 | CFPAC-1- Pancreatic ductal | 92.0 |
| | | adenocarcinoma | |
| KM20L2- Colon cancer | 2.1 | PANC-1- Pancreatic | 20.7 |
| | | epithelioid ductal carcinoma | |
| NCI-H716- Colon cancer | 43.5 | T24- Bladder carcinoma | 8.4 |
| | | (transitional cell) | |
| SW-48- Colon | 29.5 | 5637- Bladder carcinoma | 26.1 |
| adenocarcinoma | | | |
| SW1116- Colon | 6.6 | HT-1197- Bladder carcinoma | 7.0 |
| adenocarcinoma | | | |
| LS 174T- Colon | 12.1 | UM-UC-3- Bladder carcinma | 1.4 |
| adenocarcinoma | | (transitional cell) | |
| SW-948- Colon | 3.0 | A204- Rhabdomyosarcoma | 10.4 |
| adenocarcinoma | | | |
| SW-480- Colon | 8.4 | HT-1080- Fibrosarcoma | 30.1 |
| adenocarcinoma | | | |
| NCI-SNU-5- Gastric | 9.0 | MG-63- Osteosarcoma | 7.6 |
| carcinoma | | | |
| KATO III- Gastric | 46.7 | SK-LMS-1- Leiomyosarcoma | 39.2 |
| carcinoma | | (vulva) | |
| NCI-SNU-16- Gastric | 26.4 | SJRH30- Rhabdomyosarcoma | 24.5 |
| carcinoma | | (met to bone marrow) | |
| NCI-SNU-1- Gastric | 84.7 | A431- Epidermoid carcinoma | 47.0 |
| carcinoma | | | |
| RF-1- Gastric | 30.4 | WM266-4- Melanoma | 25.5 |
| adenocarcinoma | | | |
| RF-48- Gastric | 15.8 | DU 145- Prostate carcinoma | 0.0 |
| adenocarcinoma | | (brain metastasis) | |
| MKN-45- Gastric | 8.8 | MDA-MB-468- Breast | 0.9 |
| carcinoma | | adenocarcinoma | |
| NCI-N87- Gastric | 12.4 | SCC-4- Squamous cell | 0.0 |
| carcinoma | | carcinoma of tongue | |
| OVCAR-5- Ovarian | 4.5 | SCC-9- Squamous cell | 0.0 |
| carcinoma | | carcinoma of tongue | |
| RL95-2- Uterine | 2.3 | SCC-15- Squamous cell | 0.6 |
| carcinoma | | carcinoma of tongue | |
| HelaS3- Cervical | 19.8 | CAL 27- Squamous cell | 25.9 |
| adenocarcinoma | | carcinoma of tongue | |

[1000] TABLE 91
Panel 4D

| | Rel. Exp. (%) Ag3195, Run | | Rel. Exp. (%) Ag3195, Run |
|---|---|---|---|
| Tissue Name | 164530142 | Tissue Name | 164530142 |
| Secondary Th1 act | 5.7 | HUVEC IL-1beta | 1.7 |
| Secondary Th2 act | 4.6 | HUVEC IFN gamma | 4.5 |
| Secondary Tr1 act | 5.1 | HUVEC TNF alpha + IFN | 9.0 |
| | | gamma | |
| Secondary Th1 rest | 1.7 | HUVEC TNF alpha + IL4 | 3.3 |
| Secondary Th2 rest | 2.9 | HUVEC IL-11 | 1.6 |
| Secondary Tr1 rest | 4.2 | Lung Microvascular EC | 7.4 |
| | | none | |
| Primary Th1 act | 0.8 | Lung Microvascular EC | 6.9 |
| | | TNFalpha + IL-1beta | |
| Primary Th2 act | 1.5 | Microvascular Dermal EC | 11.2 |
| | | none | |
| Primary Tr1 act | 2.5 | Microsvasular Dermal EC | 6.0 |
| | | TNFalpha + IL-1beta | |
| Primary Th1 rest | 24.5 | Bronchial epithelium | 18.2 |
| | | TNFalpha + IL1beta | |
| Primary Th2 rest | 14.1 | Small airway epithelium | 6.8 |
| | | none | |
| Primary Tr1 rest | 5.2 | Small airway epithelium | 100.0 |
| | | TNFalpha + IL-1beta | |
| CD45RA CD4 | 11.6 | Coronery artery SMC rest | 2.8 |
| lymphocyte act | | | |
| CD45RO CD4 | 6.4 | Coronery artery SMC | 1.5 |
| lymphocyte act | | TNFalpha + IL-1beta | |
| CD8 lymphocyte act | 6.3 | Astrocytes rest | 2.5 |
| Secondary CD8 | 6.7 | Astrocytes TNFalpha + | 1.8 |
| lymphocyte rest | | IL-1beta | |
| Secondary CD8 | 4.9 | KU-812 (Basophil) rest | 4.6 |
| lymphocyte act | | | |
| CD4 lymphocyte none | 10.1 | KU-812 (Basophil) | 11.0 |
| | | PMA/ionomycin | |
| 2ry Th1/Th2/Tr1_anti- | 7.7 | CCD1106 (Keratinocytes) | 9.5 |
| CD95 CH11 | | none | |
| LAK cells rest | 19.2 | CCD1106 (Keratinocytes) | 10.3 |
| | | TNFalpha + IL-1beta | |
| LAK cells IL-2 | 14.2 | Liver cirrhosis | 1.6 |
| LAK cells IL-2 + IL-12 | 12.7 | Lupus kidney | 3.3 |
| LAK cells IL-2 + IFN | 20.3 | NCI-H292 none | 30.8 |
| gamma | | | |
| LAK cells IL-2 + IL-18 | 17.7 | NCI-H292 IL-4 | 26.2 |
| LAK cells | 3.9 | NCI-H292 IL-9 | 27.4 |
| PMA/ionomycin | | | |
| NK Cells IL-2 rest | 7.6 | NCI-H292 IL-13 | 14.7 |
| Two Way MLR 3 day | 17.1 | NCI-H292 IFN gamma | 22.8 |
| Two Way MLR 5 day | 5.9 | HPAEC none | 2.8 |
| Two Way MLR 7 day | 4.3 | HPAEC TNF alpha + IL-1 | 4.7 |
| | | beta | |
| PBMC rest | 3.3 | Lung fibroblast none | 3.2 |
| PBMC PWM | 27.2 | Lung fibroblast TNF alpha + | 3.1 |
| | | IL-1 beta | |
| PBMC PHA-L | 7.1 | Lung fibroblast IL-4 | 4.4 |
| Ramos (B cell) none | 1.0 | Lung fibroblast IL-9 | 4.2 |
| Ramos (B cell) | 3.7 | Lung fibroblast IL-13 | 4.7 |
| ionomycin | | | |
| B lymphocytes PWM | 23.7 | Lung fibroblast IFN | 7.5 |
| | | gamma | |
| B lymphocytes CD40L | 14.5 | Dermal fibroblast | 23.3 |
| and IL-4 | | CCD1070 rest | |
| EOL-1 dbcAMP | 14.8 | Dermal fibroblast | 38.4 |
| | | CCD1070 TNF alpha | |
| EOL-1 dbcAMP | 6.0 | Dermal fibroblast | 12.2 |
| PMA/ionomycin | | CCD1070 IL-1 beta | |
| Dendritic cells none | 13.5 | Dermal fibroblast IFN | 14.5 |
| | | gamma | |
| Dendritic cells LPS | 13.7 | Dermal fibroblast IL-4 | 19.9 |
| Dendritic cells anti- | 16.3 | IBD Colitis 2 | 1.2 |
| CD40 | | | |
| Monocytes rest | 29.9 | IBD Crohn's | 2.1 |
| Monocytes LPS | 5.3 | Colon | 11.6 |
| Macrophages rest | 11.7 | Lung | 5.8 |
| Macrophages LPS | 9.7 | Thymus | 39.8 |
| HUVEC none | 3.3 | Kidney | 31.0 |
| HUVEC starved | 9.3 | | |

[1001] AI_comprehensive panel_v1.0 Summary: Ag3195 The NOV11D gene is expressed in normal lung, bone, joint tissue, gut and skin. There is no apparent difference in transcript expression in disease tissue as compared to normal tissue. Please see Panel 4D for discussion of utility of this gene in an autoimmune context.

[1002] CNS_neurodegeneration_v1.0 Summary: Ag3195 The expression profile of the NOV11D gene shows higher expression in the temporal cortex of Alzheimers disease victims. This gene encodes an alpha glucosidase homolog. Brain glucose regulation may play a role in Alzheimer's disease. For example, hyperglycemia may exert a deleterious effect by potentiating the neuronal death produced by pathological processes taking place, such as amyloid deposition. The category of agents that interfere with the absorption of glucose and lipids includes alpha-glucosidase inhibitors. Therefore, modulators of this gene product may be useful in the treatment of Alzheimer's disease.

[1003] References:

[1004] Messier C, Gagnon M. Glucose regulation and cognitive functions: relation to Alzheimer's disease and diabetes. Behav Brain Res February 1996;75(1-2):1-11

[1005] Glucose has been found to improve memory in animals and humans. Animal research has revealed that glucose may improve memory through a facilitation of acetylcholine (ACh) synthesis and release in the brain. This glucose-related memory improvement has prompted research in elderly humans. These studies have shown that the memory-improving action of glucose depends on each individuals' blood glucose regulation. Based on these data, researchers have evaluated the effect of glucose on memory in patients with Alzheimer's disease (AD). Results demonstrated that glucose could improve memory in a subset of patients that had abnormalities in their blood glucose regulation. Interestingly, these alterations in blood glucose regulation were believed to depend on the severity of the disease process. Another line of investigation has focused on alterations in brain glucose metabolism. Both animal models and studies with Type II diabetic elderly patients have shown that altered glucose regulation impairs learning and memory processes. It is possible that in AD patients, hyperglycemia exerts a deleterious effect by potentiating the neuronal death produced by other pathological processes taking place such as amyloid deposition. Based on these data, it appears important to find the prevalence of altered glucoregulation at various stages of AD. Secondly, it may be of interest to determine prospectively whether altered glucoregulation is linked to a faster progression of the disease. Finally, if such a relationship is observed, the next logical step would be to determine whether AD patients could benefit from treatments aimed at normalizing blood glucose regulation and improving insulin sensitivity.

[1006] Panel 1 Summary: Ag401 The expression of the NOV11d gene appears to be highest in a sample derived from testis tissue (CT=26.1). In addition to testis tissue, there appears to be substantial expression associated with the cerebellar region of the brain and mammary gland. The other samples in the panel show low uniform expression. Thus, the expression of this gene could be used to distinguish testis, mammary gland and cerebellum from the other samples in the panel.

[1007] Please see Panel CNS_neurodegeneration_v1.0 for discussion of potential utility of this gene in the central nervous system.

[1008] This gene is also moderately expressed in a number of metabolic tissues including pancreas, adrenal, thyroid, pituitary, heart, skeletal muscle, and adult and fetal liver. This small molecule target may be useful for the treatment of metabolic diseases, including obesity and Types 1 and 2 diabetes.

[1009] Panel 1.3D Summary: Ag401/Ag3195 Three experiments expression of the NOV11d gene in a wide variety of metabolic tissues, including pancreas, adipose, adrenal, thyroid, pituitary, adult and fetal heart, adult and fetal skeletal muscle, and adult and fetal liver. Alpha-glucosidase inhibitors are currently used in the treatment of Type 2 diabetes to decrease glucose absorption from the gut. Thus, this gene product may be a small molecule target for the treatment of metabolic diseases, including obesity and Types 1 and 2 diabetes.

[1010] Significant brain expression of the gene is also seen in this panel. Please see Panel CNS_neurodegeneration_v1.0 for discussion of potential utility of this gene in the central nervous system.

[1011] References:

[1012] Raptis S A, Dimitriadis G D. Oral hypoglycemic agents: insulin secretagogues, alpha-glucosidase inhibitors and insulin sensitizers. Exp Clin Endocrinol Diabetes. 2001;109 Suppl 2:S265-87.

[1013] In this review we present the agents that are in use in the treatment of type 2 diabetes. Sulfonylureas of the 1st and 2nd generation increase insulin secretion but can induce hyperinsulinemia and sometimes prolonged hypoglycemia. Glimepiride is a new 3rd generation sulfonylurea with some advantages over the other members of this group, such as a lower risk of hypoglycemia, no interaction with cardiovascular KATP-channels and a possibility that it may increase insulin sensitivity. There are also newer insulin secretagogues (such as neteglinide and repaglinide) with a rapid onset of action on the beta-cell, therefore inducing a more physiological profile of insulin secretion during meals. The category of insulin sensitizers includes metformin and thiazolidinediones. Metformin effectively reduces hyperglycemia, hyperlipidemia and macroangiopathy in patients with type 2 diabetes. This agent increases the sensitivity of the liver and peripheral tissues to insulin and, therefore, it could be considered as a drug of choice for the prevention of type 2 diabetes. Thiazolidinediones (rosiglitazone and pioglitazone) increase the sensitivity of the tissues to insulin. This mechanism of action makes them powerful therapeutic tools for the treatment of type 2 diabetes (and possibly other insulin resistant states) either alone or in combination with other oral agents. The category of agents that interfere with the absorption of glucose and lipids includes alpha-glucosidase inhibitors (acarbose and miglitol) and lipase inhibitors (or-listat). alpha-Glucocidase inhibitors improve the time relationship between plasma insulin and glucose increases after a meal. Therefore, these agents may be used in the treatment of patients with type 2 diabetes, either alone at a very early stage of this disease (when insulin secretion is still adequate), or in combination with insulin secretagogues. alpha-Glucosidase inhibition may also prove useful as a supplement to insulin therapy in patients with type 1 diabetes mellitus. The inhibitor of gastrointestinal lipase orlistat may prove a useful adjunct to hypocaloric diets in patients with type 2 diabetes and obesity.

[1014] PMID: 11460577

[1015] Panel 2D Summary: Ag3195 The expression of the NOV11d gene appears to be highest in a sample of normal lung tissue adjacent to malignant lung (CT=27.4). In addition, there appears to be substantial expression in other samples of normal lung tissue, normal kidney tissue and normal colon tissue. Thus, the expresion of this gene could be used to distinguish normal lung, kidney and colon form other samples in the panel. Moreover, therapeutic modulation of this gene, through the use of small molecule drugs, antibodies or protein therapeutics might be of benefit in the treatment of lung, kidney or colon cancer.

[1016] Panel 3D Summary: Ag3195 The expression of the NOV11d gene appears to be highest in a sample derived from a lung cancer cell line(CT=29.9). In addition, there appears to be substantial expression in a number of lung cnacer cell lines in addition to a number of other samples in this panel. Thus, the expression of this gene could be used to distinguish this lung cancer cell line derived sample from other samples in the panel.

[1017] Panel 4D Summary: Ag3195 The NOV11d transcript is expressed at high levels in small airway epithelium activated with TNFalpha and IL-1beta. It is also expressed in normal tissues such as the lung, thymus and kidney, as seen in Panel AI. The protein encoded by this transcript is related to Alpha glucosidase A. This enzyme is important in lung maturation and may contribute to surfactant phospholipid biosynthesis (see reference). Therefore, therapeutics designed with the protein encoded by this transcript or therapeutics that modulate its production could potentially be used to aid lung surfactant production in premature infants, and to treat lung injuries.

[1018] References:

[1019] Bourbon J R, Doucet E, Rieutort M. Role of alpha-glucosidase in fetal lung maturation.Biochim Biophys Acta Jan. 13, 1987;917(1):203-10

[1020] The role of lysosomal enzyme acid alpha-glucosidase in fetal lung development was investigated with the aid of a specific inhibitor, the pseudosaccharide acarbose. The drug was added to a Waymouth culture medium of fetal rat lung explants cultivated for 48 h fromgestational stage 19.5 days, an in vitro system previously shown to allow morphological and biochemical maturation of alveolar epithelium. Glycogenolysis was reduced by 40% as compared with tissue cultivated on control medium, which means thatalpha-glucosidase could account for as much as 40% of fetal lung glycogenolysis, the remaining 60% being presumably achieved by cytosolic phosphorylase and by a microsomal neutral alpha-glucosidase. By the same time, the increase of phospholipids of surfactant fraction extracted from cultivated explants was partially inhibited: total and saturated phosphatidylcholine, phosphatidylethanolamine, phosphatidylglycerol and phosphatidylinositol were about 30-40% lower than in lungs cultivated on control medium. It should beemphasized that DNA concentration and increases in non-surfactant phospholipids were unchanged by the drug. alpha-Glucosidase activity was evidenced in the lysosomal fraction, in the microsomal fraction and, although in lower amounts, in the surfactant fraction extracted from term fetal lung. The results suggest that lysosomal alpha-glucosidase plays a major role in lung maturation and could facilitate glycogenolysis for the specific use of glycogen stores in providing substrates for surfactant phospholipid biosynthesis. PMID: 3539207

### Example 3

[1021] SNP Analysis of NOVX Clones

[1022] SeqCallingTM Technology: cDNA was derived from various human samples representing multiple tissue types, normal and diseased states, physiological states, and developmental states from different donors. Samples were obtained as whole tissue, cell lines, primary cells or tissue cultured primary cells and cell lines. Cells and cell lines may have been treated with biological or chemical agents that regulate gene expression for example, growth factors, chemokines, steroids. The cDNA thus derived was then sequenced using CuraGen's proprietary SeqCalling technology. Sequence traces were evaluated manually and edited for corrections if appropriate. cDNA sequences from all samples were assembled with themselves and with public ESTs using bioinformatics programs to generate CuraGen's human SeqCalling database of SeqCalling assemblies. Each assembly contains one or more overlapping cDNA sequences derived from one or more human samples. Fragments and ESTs were included as components for an assembly when the extent of identity with another component of the assembly was at least 95% over 50 bp. Each assembly can represent a gene and/or its variants such as splice forms and/or single nucleotide polymorphisms (SNPs) and their combinations.

[1023] Variant sequences are included in this application. A variant sequence can include a single nucleotide polymorphism (SNP). A SNP can, in some instances, be referred to as a “cSNP” to denote that the nucleotide sequence containing the SNP originates as a cDNA. A SNP can arise in several ways. For example, a SNP may be due to a substitution of one nucleotide for another at the polymorphic site. Such a substitution can be either a transition or a transversion. A SNP can also arise from a deletion of a nucleotide or an insertion of a nucleotide, relative to a reference allele. In this case, the polymorphic site is a site at which one allele bears a gap with respect to a particular nucleotide in another allele. SNPs occurring within genes may result in an alteration of the amino acid encoded by the gene at the position of the SNP. Intragenic SNPs may also be silent, however, in the case that a codon including a SNP encodes the same amino acid as a result of the redundancy of the genetic code. SNPs occurring outside the region of a gene, or in an intron within a gene, do not result in changes in any amino acid sequence of a protein but may result in altered regulation of the expression pattern for example, alteration in temporal expression, physiological response regulation, cell type expression regulation, intensity of expression, stability of transcribed message.

[1024] Method of novel SNP Identification: SNPs are identified by analyzing sequence assemblies using CuraGen's proprietary SNPTool algorithm. SNPTool identifies variation in assemblies with the following criteria: SNPs are not analyzed within 10 base pairs on both ends of an alignment; Window size (number of bases in a view) is 10; The allowed number of mismatches in a window is 2; Minimum SNP base quality (PHRED score) is 23; Minimum number of changes to score an SNP is 2/assembly position. SNPTool analyzes the assembly and displays SNP positions, associated individual variant sequences in the assembly, the depth of the assembly at that given position, the putative assembly allele frequency, and the SNP sequence variation. Sequence traces are then selected and brought into view for manual validation. The consensus assembly sequence is imported into CuraTools along with variant sequence changes to identify potential amino acid changes resulting from the SNP sequence variation. Comprehensive SNP data analysis is then exported into the SNPCalling database.

[1025] Method of novel SNP Confirmation: SNPs are confirmed employing a validated method know as Pyrosequencing (Pyrosequencing, Westborough, Mass.). Detailed protocols for Pyrosequencing can be found in: Alderborn et al. Determination of Single Nucleotide Polymorphisms by Real-time Pyrophosphate DNA Sequencing. (2000). Genome Research. 10, Issue 8, August. 1249-1265. In brief, Pyrosequencing is a real time primer extension process of genotyping. This protocol takes double-stranded, biotinylated PCR products from genomic DNA samples and binds them to streptavidin beads. These beads are then denatured producing single stranded bound DNA. SNPs are characterized utilizing a technique based on an indirect bioluminometric assay of pyrophosphate (PPi) that is released from each DNTP upon DNA chain elongation. Following Klenow polymerase-mediated base incorporation, PPi is released and used as a substrate, together with adenosine 5′-phosphosulfate (APS), for ATP sulfurylase, which results in the formation of ATP. Subsequently, the ATP accomplishes the conversion of luciferin to its oxi-derivative by the action of luciferase. The ensuing light output becomes proportional to the number of added bases, up to about four bases. To allow processivity of the method dNTP excess is degraded by apyrase, which is also present in the starting reaction mixture, so that only dNTPs are added to the template during the sequencing. The process has been fully automated and adapted to a 96-well format, which allows rapid screening of large SNP panels. The DNA and protein sequences for the novel single nucleotide polymorphic variants are reported. Variants are reported individually but any combination of all or a select subset of variants are also included. In addition, the positions of the variant bases and the variant amino acid residues are underlined.

### Results

[1026] Variants are reported individually but any combination of all or a select subset of variants are also included as contemplated NOVX embodiments of the invention.

[1027] NOV1d SNP Data:

[1028] NOV1d has two SNP variants, whose variant positions for its nucleotide and amino acid sequences is numbered according to SEQ ID NOs: 7 and 8, respectively. The nucleotide sequence of the NOV1d variant differs as shown in Table 92.

TABLE 92
cSNP and Coding Variants for NOV3a

| NT Position | Wild Type | | Amino Acid | Amino Acid |
|---|---|---|---|---|
| of cSNP | NT | Variant NT | position | Change |
| 85 | T | C | 29 | C->R |
| 92 | C | T | 31 | A->V |
| 370 | C | T | 124 | F->L |

[1029] NOV5 SNP data:

[1030] NOV5 has four SNP variants, whose variant positions for its nucleotide and amino acid sequences is numbered according to SEQ ID NOs: 21 and 22, respectively. The nucleotide sequences of the NOV5 variant differs as shown in Table 93.

TABLE 93
cSNP and Coding Variants for NOV5

| NT Position | Wild Type | | Amino Acid | Amino Acid |
|---|---|---|---|---|
| of cSNP | NT | Variant NT | position | Change |
| 200 | C | T | 18 | A->V |
| 285 | C | T | 46 | No change |
| 310 | C | T | 55 | R->C |
| 393 | G | A | 82 | W->End |
| 478 | T | C | 111 | F->S |

[1031] NOV7 SNP data:

[1032] NOV7 has one SNP variant, whose variant position for its nucleotide and amino acid sequences is numbered according to SEQ ID NOs: 19 and 20, respectively. The nucleotide sequences of the NOV7 variant differs as shown in Table 94.

TABLE 94
cSNP and Coding Variants for NOV7

| NT Position | Wild Type | | Amino Acid | Amino Acid |
|---|---|---|---|---|
| of cSNP | NT | Variant NT | position | Change |
| 530 | A | G | | No change |
| 1580 | C | T | | No change |

[1033] NOV8 SNP data:

[1034] NOV8 has one SNP variant, whose variant position for its nucleotide and amino acid sequences is numbered according to SEQ ID NOs: 19 and 20, respectively. The nucleotide sequence of the NOV8 variant differs as shown in Table 95.

TABLE 95
cSNP and Coding Variants for NOV8

| NT Position | Wild Type | | | Putative |
|---|---|---|---|---|
| of cSNP | NT | Variant NT | Depth | Allele Freq. |
| 536 | C | T | 23 | 0.130 |
| NT Position | Wild Type | | Amino Acid | Amino Acid |
| of cSNP | NT | Variant NT | position | Change |
| 162 | C | T | 54 | No change |

[1035] NOV9 SNP data:

[1036] NOV9 has one SNP variant, whose variant position for its nucleotide and amino acid sequences is numbered according to SEQ ID NOs: 19 and 20, respectively. The nucleotide sequence of he NOV9 variant differs as shown in Table 96.

TABLE 96
cSNP and Coding Variants for NOV9

| NT Position | Wild Type | | Amino Acid | Amino Acid |
|---|---|---|---|---|
| of cSNP | NT | Variant NT | position | Change |
| 123 | A | G | 38 | T->A |
| 181 | A | C | 57 | N->T |
| 234 | A | G | 75 | T->A |
| 367 | C | T | 119 | A->V |
| 687 | A | G | 126 | M->V |
| 773 | A | G | 254 | No change |

[1037] NOV12a SNP data:

[1038] NOV12a has one SNP variant, whose variant position for its nucleotide and amino acid sequences is numbered according to SEQ ID NOs: 19 and 20, respectively. The nucleotide sequence of the NOV12a variant differs as shown in Table 97.

TABLE 97
cSNP and Coding Variants for NOV12a

| NT Position | Wild Type | | Amino Acid | Amino Acid |
|---|---|---|---|---|
| of cSNP | NT | Variant NT | position | Change |
| 1890 | T | C | 629 | S->P |

[1039] NOV13 SNP data:

[1040] NOV13 has one SNP variant, whose variant position for its nucleotide and amino acid sequences is numbered according to SEQ ID NOs: 19 and 20, respectively. The nucleotide sequence of the NOV13 variant differs as shown in Table 98.

TABLE 98
cSNP and Coding Variants for NOV13

| NT Position | Wild Type | | Amino Acid | Amino Acid |
|---|---|---|---|---|
| of cSNP | NT | Variant NT | position | Change |
| 783 | T | C | 234 | C->R |

### Example 4

[1041] In-frame Cloning

[1042] NOV1b-1d

[1043] For NOV1b-1d, the cDNA coding for the DOMAIN of NOV1a from residues 189 to 420 was targeted for “in-frame” cloning by PCR. The PCR template was based on the previously identified plasmid, when available, or on human cDNA(s).

TABLE 99
Oligonucleotide primers used to clone the target cDNA sequence:

| Primers | Sequences | |
|---|---|---|
| F1 | 5′-AGATCT GTCCAAGGAAGGGAAACAGCTATGGAAGGGGAA-3′ | (SEQ ID NO:238) |
| R1 | 5′-CTCGAG CATACCAGTCTTTGAGGCAATCCAATCTCG-3′ | (SEQ ID NO:239) |

[1044] NOV12b-12e

[1045] For NOV12b-12e, the cDNA coding for the DOMAIN of NOV12b-12e from residues 29 to 291 was targeted for “in-frame” cloning by PCR. The PCR template was based on the previously identified plasmid, when available, or on human cDNA(s).

TABLE 100
Oligonucleotide primers used to clone the target
cDNA sequence:

| Primers | Sequences | |
|---|---|---|
| SF1 | 5′-AAAGTCCGAAAACTTCAGAAAGATAC -3′ | (SEQ ID NO:240) |
| SF2 | 5′- CTTGTCTGATAACTTCCTGACCTCCC -3′ | (SEQ ID NO:241) |
| SR1 | 5′- TTATAGCTCATTTTTAAGACCATCAGT -3′ | (SEQ ID NO:242) |
| SR2 | 5′-CAGGAAGTTATCAGACAAGTATAGGAAC-3′ | (SEQ ID NO:243) |

[1046] For downstream cloning purposes, the forward primer includes an in-frame Hind HI restriction site and the reverse primer contains an in-frame Xho I restriction site.

[1047] Two parallel PCR reactions were set up using a total of 0.5-1.0 ng human pooled cDNAs as template for each reaction. The pool is composed of 5 micrograms of each of the following human tissue cDNAs: adrenal gland, whole brain, amygdala, cerebellum, thalamus, bone marrow, fetal brain, fetal kidney, fetal liver, fetal lung, heart, kidney, liver, lymphoma, Burkitt's Raji cell line, mammary gland, pancreas, pituitary gland, placenta, prostate, salivary gland, skeletal muscle, small Intestine, spleen, stomach, thyroid, trachea, uterus.

[1048] When the tissue of expression is known and available, the second PCR was performed using the above primers and 0.5 ng-1.0 ng of one of the following human tissue cDNAs:

[1049] skeleton muscle, testis, mammary gland, adrenal gland, ovary, colon, normal cerebellum, normal adipose, normal skin, bone marrow, brain amygdala, brain hippocampus, brain substantia nigra, brain thalamus, thyroid, fetal lung, fetal liver, fetal brain, kidney, heart, spleen, uterus, pituitary gland, lymph node, salivary gland, small intestine, prostate, placenta, spinal cord, peripheral blood, trachea, stomach, pancreas, hypothalamus.

[1050] The reaction mixtures contained 2 microliters of each of the primers (original concentration: 5 pmol/ul), 1 microliter of 10 mM DNTP (Clontech Laboratories, Palo Alto Calif.) and 1 microliter of 50×Advantage-HF 2 polymerase (Clontech Laboratories) in 50 microliter-reaction volume. The following reaction conditions were used:

PCR condition 1:

| | | |
|---|---|---|
| a) | 96° C. | 3 minutes |
| b) | 96° C. | 30 seconds denaturation |
| c) | 60° C. | 30 seconds, primer annealing |
| d) | 72° C. | 6 minutes extension |

Repeat steps b-d 15 times

| | | |
|---|---|---|
| e) | 96° C. | 15 seconds denaturation |
| f) | 60° C. | 30 seconds, primer annealing |
| g) | 72° C. | 6 minutes extension |

Repeat steps e-g 29 times

| | | |
|---|---|---|
| e) | 72° C. | 10 minutes final extension |

PCR condition 2:

| | | |
|---|---|---|
| a) | 96° C. | 3 minutes |
| b) | 96° C. | 15 seconds denaturation |
| c) | 76° C. | 30 seconds, primer annealing, reducing the temperature by |
| | | 1° C. per cycle |
| d) | 72° C. | 4 minutes extension |

Repeat steps b-d 34 times

| | | |
|---|---|---|
| e) | 72° C. | 10 minutes final extension |

[1051] An amplified product was detected by agarose gel electrophoresis. The fragment was gel-purified and ligated into the pCR2. 1 vector (Invitrogen, Carlsbad, Calif.) following the manufacturer's recommendation. Twelve clones per PCR reaction were picked and sequenced. The inserts were sequenced using vector-specific M13 Forward and M13 Reverse primers and the gene-specific primers in Tables 88 and 89.

TABLE 88
Gene-specific Primers

| NOV | Primers | Sequences | |
|---|---|---|---|
| NOV11c | SF1 | GCCCTCCCGGTCCAGGTC | (SEQ ID NO:200) |
| | SF2 | GGCGACGGCACCAGCATGT | (SEQ ID NO:201) |
| | SR1 | GCCTGGCCTGCCGGGTTCT | (SEQ ID NO:202) |
| | SR2 | CATGAGCACGTGGTAAGCG | (SEQ ID NO:203) |

[1052] TABLE 89
Gene-specific Primers

| NOV | Primers | Sequences | |
|---|---|---|---|
| NOV1b | SF1 | GTGCTGGCATTGGAGTGTTTAGTG | (SEQ ID NO:204) |
| | SF2 | ATCAAGCACGTTGACACAGAATGAG | (SEQ ID NO:205) |
| | SF3 | GCATTCACTAACCTAACACCATTTACA | (SEQ ID NO:206) |
| | SF4 | GTTCAGCAGAGATGTCGTCTGACCTTC | (SEQ ID NO:207) |
| | SF5 | GGGATCCTCCACATCCTGTATTTTT | (SEQ ID NO:208) |
| | SF6 | TGAAGAACACATCAACAACAGACATAA | (SEQ ID NO:209) |
| | SR1 | ACTGTTTTCAGCAGCTACCTTAATTTC | (SEQ ID NO:210) |
| | SR2 | CTTGATGAATGTGTGGTACGCGAT | (SEQ ID NO:211) |
| | SR3 | GTGAATGCAAACTTGAGGTCTTTTGT | (SEQ ID NO:212) |
| | SR4 | CCTCATATAATCCTACCATTGGCTGTACT | (SEQ ID NO:213) |
| | SR5 | GAGGATCCCAGTGTAAAAATACTTCTG | (SEQ ID NO:214) |
| | SR6 | TAGCACTTCATAAGCAATAATGATCCC | (SEQ ID NO:215) |
| | SR7 | TGAGTGTACTAGCAGACACCTCAATGAT | (SEQ ID NO:216) |

### Other Embodiments

[1053] Although particular embodiments have been disclosed herein in detail, this has been done by way of example for purposes of illustration only, and is not intended to be limiting with respect to the scope of the appended claims, which follow. In particular, it is contemplated by the inventors that various substitutions, alterations, and modifications may be made to the invention without departing from the spirit and scope of the invention as defined by the claims. The choice of nucleic acid starting material, clone of interest, or library type is believed to be a matter of routine for a person of ordinary skill in the art with knowledge of the embodiments described herein. Other aspects, advantages, and modifications considered to be within the scope of the following claims.

The application's sequence listing, which the Patent Office published only in electronic form, follows.

SEQUENCE LISTING (260 sequences)

SEQ ID NO: 1 - DNA, 1386 bp, Homo sapiens
aaaaggaacatttagtcttaaaatcctattcatttttaacacacaattctttctcaaaaggccatgacactgggtagaagagtgagttcactgaaaccatggatgtttgcccttattgtcagagctgttgtgttgattctggtgatactgattggtctccttgtttattttttggcatataagttttactattaccaaacctccttccagatccccagtattgaatataatttagctattaatacttgtgtgacacaagaggagagaatctatgacaataaaatgtgtaaaataatgtctaggatatttcgacattcttctgtaggcggtcgatttatcaaatctcatgttatcaaattaaggccaagtaatgacaatttgaaagcagatgtattgcttaaatttcagtttattcctaacaatgagaacgcaataaaaacacaagctgataacattttgcatcagaagttgaaatcaaatgaaagctctttgaccataaacaaaccatcatttagactcacacctattgacagcaaaaagatgaggaatcttctcaacagtcgctgtggaataaggatgacatcttcaaacatgccattaccagcatcctcttctactcaaagaattgtccaaggaagggaaacagctatggaaggggaatggccatggcaggccagcctccagctcatagggtcaggccatcagtgtggagccagcctcatcagtaacacatggctgctcacagcagctcactgcttttggaaaaataaagacccaactcaatggattgctacttttggtgcaactataacaccacccgcagtgaaacgaaatgtgaggaaaattattcttcatgagaattaccatagagaaacaaatgaaaatgacattgctttggttcagctctctactggagttgagttttcaaatatagtccagagagtttgcctcccagactcatctataaagttgccacctaaaacaagtgtgttcgtcacaggatttggatccattgtagatgatggacctatacaaaatacacttcggcaagccagagtggaaaccataagcactgatgtgtgtaacagaaaggatgtgtatgatggcctgataactccaggaatgttatgtgctggattcatggaaggaaaaatagatgcatgtaagggagattctggtggacctctggtttatgataatcatgacatctggtacattgtaggtatagtaagttggggacaatcatgtgcacttcccaaaaaacctggagtctacaccagagtaactaagtatcgagattggattgcctcaaagactggtatgtagtgtggattgtccatgagttatacacatggcacacagagctgatactcctgcgtatttgta

SEQ ID NO: 2 - protein, 420 aa, Homo sapiens
MTLGRRVSSLKPWMFALIVRAVVLILVILIGLLVYFLAYKFYYYQTSFQIPSIEYNLAINTCVTQEERIYDNKMCKIMSRIFRHSSVGGRFIKSHVIKLRPSNDNLKADVLLKFQFIPNNENAIKTQADNILHQKLKSNESSLTINKPSFRLTPIDSKKMRNLLNSRCGIRMTSSNMPLPASSSTQRIVQGRETAMEGEWPWQASLQLIGSGHQCGASLISNTWLLTAAHCFWKNKDPTQWIATFGATITPPAVKRNVRKIILHENYHRETNENDIALVQLSTGVEFSNIVQRVCLPDSSIKLPPKTSVFVTGFGSIVDDGPIQNTLRQARVETISTDVCNRKDVYDGLITPGMLCAGFMEGKIDACKGDSGGPLVYDNHDIWYIVGIVSWGQSCALPKKPGVYTRVTKYRDWIASKTGM

SEQ ID NO: 3 - DNA, 708 bp, Homo sapiens
agatctgtccaaggaagggaaacagctatggaaggggaatggccatggcaggccagcctccagctcatagggtcaggccatcagtgtggagccagcctcatcagtaacacatggctgctcacagcagctcactgcttttggaaaaataaagacccaactcaatggattgctacttttggtgcaactataacaccacccgcagtgaaacgaaatgtgaggaaaattattcttcatgagaattaccatagagaaacaaatgaaaatgacattgctttggttcagctctctactggagtcgggttttcaaatatagtccagagagtttgcctcccagactcatctataaagttgccacctaaaacaagtgtgttcgtcacaggatttggatccattgtagatgatggacctatacaaaatacacttcggcaagccagagtggaaaccataagcactgatgtgtgtaacagaaaggatgtgtatgatggcctgataactccaggaatgttatgtgctggattcatggaaggaaaaatagatgcatgtaagggagattctggtggacctctggtttatgataatcatgacatctggtacattgtaggtatagtaagttggggacaatcatgtgcacttcccaaaaaacctggagtctacaccagagtaactaagtatcgagattggattgcctcaaagactggtatgctcgag

SEQ ID NO: 4 - protein, 236 aa, Homo sapiens
RSVQGRETAMEGEWPWQASLQLIGSGHQCGASLISNTWLLTAAHCFWKNKDPTQWIATFGATITPPAVKRNVRKIILHENYHRETNENDIALVQLSTGVGFSNIVQRVCLPDSSIKLPPKTSVFVTGFGSIVDDGPIQNTLRQARVETISTDVCNRKDVYDGLITPGMLCAGFMEGKIDACKGDSGGPLVYDNHDIWYIVGIVSWGQSCALPKKPGVYTRVTKYRDWIASKTGMLE

SEQ ID NO: 5 - DNA, 708 bp, Homo sapiens
agatctgtccaaggaagggaaacagctatggaaggggaatggccatggcaggccagcctccagctcatagggtcaggccatcagtgtggagccagcctcatcagtaacacatggctgctcacagcagctcactgcttttggaaaaataaagacccaactcaatggattgctacttttggtgcaactataacaccacccgcagtgaaacgaaatgtgaggaaaattattcttcatgagaattaccatagagaaacaaatgaaaatgacattgctttggttcagctctctactggagttgagttttcaaatatagtccagagagtttacctcccagactcatctataaagttgccacctaaaacaagtgtgttcgtcacaggatttggatccattgtagatgatggacctatacaaaatacacttcggcaagccagagtggaaaccataagcactgatgtgtgtaacagaaaggatgtgtatgatggcctgataactccaggaatgttatgtgctggattcatggaaggaaaaatagatgcatgtaagggagattctggtggacctctggtttatgataatcatgacatctggtacattgtaggtatagtaagttggggacaatcatgtgcacttcccaaaaaacctggagtctacaccagagtaactaagtatcgagattggattgcctcaaagactggtatgctcgag

SEQ ID NO: 6 - protein, 236 aa, Homo sapiens
RSVQGRETAMEGEWPWQASLQLIGSGHQCGASLISNTWLLTAAHCFWKNKDPTQWIATFGATITPPAVKRNVRKIILHENYHRETNENDIALVQLSTGVEFSNIVQRVYLPDSSIKLPPKTSVFVTGFGSIVDDGPIQNTLRQARVETISTDVCNRKDVYDGLITPGMLCAGFMEGKIDACKGDSGGPLVYDNHDIWYIVGIVSWGQSCALPKKPGVYTRVTKYRDWIASKTGMLE

SEQ ID NO: 7 - DNA, 708 bp, Homo sapiens
agatctgtccaaggaagggaaacagctatggaaggggaatggccatggcaggccagcctccagctcatagggtcaggccatcagtgtggagccagcctcatcagtaacacatggctgctcacagcagctcactgcttttggaaaaataaagacccaactcaatggattgctacttttggtgcaactataacaccacccgcagtgaaacgaaatgtgaggaaaattattcttcatgagaattaccatagagaaacaaatgaaaatgacattgctttggttcagctctctactggagttgagttttcaaatatagtccagagagtttgcctcccagactcatctataaagttgccacctaaaacaagtgtgctcgtcacaggatttggatccattgtagatgatggacctatacaaaatacacttcggcaagccagagtggaaaccataagcactgatgtgtgtaacagaaaggatgtgtatgatggcctgataactccaggaatgttatgtgctggattcatggaaggaaaaatagatgcatgtaagggagattctggtggacctctggtttatgataatcatgacatctggtacattgtaggtatagtaagttggggacaatcatgtgcacttcccaaaaaacctggagtctacaccagagtaactaagtatcgagattggattgcctcaaagactggtatgctcgag

SEQ ID NO: 8 - protein, 236 aa, Homo sapiens
RSVQGRETAMEGEWPWQASLQLIGSGHQCGASLISNTWLLTAAHCFWKNKDPTQWIATFGATITPPAVKRNVRKIILHENYHRETNENDIALVQLSTGVEFSNIVQRVCLPDSSIKLPPKTSVLVTGFGSIVDDGPIQNTLRQARVETISTDVCNRKDVYDGLITPGMLCAGFMEGKIDACKGDSGGPLVYDNHDIWYIVGIVSWGQSCALPKKPGVYTRVTKYRDWIASKTGMLE

SEQ ID NO: 9 - DNA, 1476 bp, Homo sapiens
atggacagcataagcacagccatcttactcctgctcctggctctcgtctgtctgctcctgaccctaagctcaagagataagggaaagctgcctccgggacccagacccctctcaatcctgggaaacctgctgctgctttgctcccaagacatgctgacttctctcactaagctgagcaaggagtatggctccatgtacacagtgcacctgggacccaggcgggtggtggtcctcagcgggtaccaagctgtgaaggaggccctggtggaccagggagaggagtttagtggccgcggtgactaccctgcctttttcaactttaccaagggcaatggcatcgccttctccagtggggatcgatggaaggtcctgagacagttctctatccagattctacggaatttcgggatggggaagagaagcattgaggagcgaatcctagaggagggcagcttcctgctggcggagctgcggaaaactgaaggcgagccctttgaccccacgtttgtgctgagtcgctcagtgtccaacattatctgttccgtgctcttcggcagccgcttcgactatgatgatgagcgtctgctcaccattatccgccttatcaatgacaacttccaaatcatgagcagcccctggggcgagttgtacgacatcttcccgagcctcctggactgggtgcctgggccgcaccaacgcatcttccagaacttcaagtgcctgagagacctcatcgcccacagcgtccacgaccaccaggcctcgctagaccccagatctccccgggacttcatccagtgcttcctcaccaagatggcagaggagaaggaggacccactgagccacttccacatggataccctgctgatgaccacacataacctgctctttggcggcaccaagacggtgagcaccacgctgcaccacgccttcctggcactcatgaagtacccaaaagttcaagcccgcgtgcaggaggagatcgacctcgtggtgggacgcgcgcggctgccggcgctgaaggaccgcgcggccatgccttacacagacgcggtgatccacgaggtgcagcgctttgcagacatcatccccatgaacttgccgcaccgcgtcactagggacacggcctttcgcggcttcctgatacccaagggcaccgatgtcatcaccctccttaacaccgtccactacgaccccagccagttcctgacgccccaggagttcaaccccgagcattttttggatgccaatcagtccttcaagaagagtccagccttcatgcccttctcagctgggcgccgtctgtgcctgggagagtcgctggcgcgcatggagctctttctgtacctcaccgccatcctgcagagcttttcgctgcagccgctgggtgcgcccgaggacatcgacctgaccccactcagctcaggtcttggcaatttgccgcggcctttccagctgtgcctgcgcccgcgctaa

SEQ ID NO: 10 - protein, 492 aa, Homo sapiens
  VARIANT (492): Wherein Xaa is any amino acid.
MDSISTAILLLLLALVCLLLTLSSRDKGKLPPGPRPLSILGNLLLLCSQDMLTSLTKLSKEYGSMYTVHLGPRRVVVLSGYQAVKEALVDQGEEFSGRGDYPAFFNFTKGNGIAFSSGDRWKVLRQFSIQILRNFGMGKRSIEERILEEGSFLLAELRKTEGEPFDPTFVLSRSVSNIICSVLFGSRFDYDDERLLTIIRLINDNFQIMSSPWGELYDIFPSLLDWVPGPHQRIFQNFKCLRDLIAHSVHDHQASLDPRSPRDFIQCFLTKMAEEKEDPLSHFHMDTLLMTTHNLLFGGTKTVSTTLHHAFLALMKYPKVQARVQEEIDLVVGRARLPALKDRAAMPYTDAVIHEVQRFADIIPMNLPHRVTRDTAFRGFLIPKGTDVITLLNTVHYDPSQFLTPQEFNPEHFLDANQSFKKSPAFMPFSAGRRLCLGESLARMELFLYLTAILQSFSLQPLGAPEDIDLTPLSSGLGNLPRPFQLCLRPRX

SEQ ID NO: 11 - DNA, 818 bp, Homo sapiens
tggctgaaggcggaggtcccccacggcccttcaggatgaaagctgcggtgctgaccttggccgtgctcttcctgacggggagccaggctcggcatttctggcagcaagatgaacccccccagagcccctgggatcgagtgaaggacctggccactgtgtacgtggatgtgctcaaagacagcgtgacctccaccttcagcaagctgcgcgaacagctcggccctgtgacccaggagttctgggataacctggaaaaggagacagagggcctgaggcaggagatgagcaaggatctggaggaggtgaaggccaaggtgcagccctacctggacgacttccagaagaagtggcaggaggagatggagctctaccgccagaaggtggagccgctgcgcgcagagctccaagagggcgcgcgccagaagctgcacgagctgcaagagaagctgagcccactgggcgaggagatgcgcgaccgcgcgcgcgcccatgtggacgcgctgcgcacgcatctggccccctacagcgacgagctgcgccagcgcttggccgcgcgccttgaggctctcaaggagaacggcggcgccagactggccgagtatcacgccaaggccaccgagcatctgagcacgctcagcgagaaggccaagcccgcgctcgaggacctccgccaaggcctgctgcccgtgctggagagcttcaaggtcagcttcctcagcgctctcgaggagtacactaagaagctcaacacccagtgaggcgcccgcgccgccccccttcccggtgctcagaataaacgtttccaaagtgggaaaaaa

SEQ ID NO: 12 - protein, 240 aa, Homo sapiens
MKAAVLTLAVLFLTGSQARHFWQQDEPPQSPWDRVKDLATVYVDVLKDSVTSTFSKLREQLGPVTQEFWDNLEKETEGLRQEMSKDLEEVKAKVQPYLDDFQKKWQEEMELYRQKVEPLRAELQEGARQKLHELQEKLSPLGEEMRDRARAHVDALRTHLAPYSDELRQRLAARLEALKENGGARLAEYHAKATEHLSTLSEKAKPALEDLRQGLLPVLESFKVSFLSALEEYTKKLNTQ

SEQ ID NO: 13 - DNA, 677 bp, Homo sapiens
atgaaagctgcggtgctgaccttggccgtgctcttcctgacgggtgggagccaggctcggcatttctggcagcaagatgaacccccccagagcccctgggatcgagtgaaggacctggccactgtgtacgtggatgtgctcaaagacagcggcgacagcgtgacctccaccttcagcaagctgcgcgaacagctcggccctgtgacccaggagttctgggataacctggaaaaggagacagagggcctgaggcaggagatgagcaaggatctggaggaggtgaaggccaaggtgcagccctacctggacgacttccagaagaagtggcaggaggagatggagctctaccgccagaaggtggagccgctgcgcgcagagctccaagagggcgcgcgccagaagctgcacgagctgcgccagcgcttggccgagcgccttgaggctctcaaggagaacggcggcgccagactggccgagtaccacgccaaggccaccgagcatctgagcacgctcagcgagaaggccaagcccgcgctcgaggacctccgccaaggcctgctgcccgtgctggagagcttcaaggtcagcttcctgagcgctctcgaggagtacactaagaagctcaacacccagtgaggcgcccgccgccgccccccttcccggtgctcagaataaac

SEQ ID NO: 14 - protein, 211 aa, Homo sapiens
MKAAVLTLAVLFLTGGSQARHFWQQDEPPQSPWDRVKDLATVYVDVLKDSGDSVTSTFSKLREQLGPVTQEFWDNLEKETEGLRQEMSKDLEEVKAKVQPYLDDFQKKWQEEMELYRQKVEPLRAELQEGARQKLHELRQRLAERLEALKENGGARLAEYHAKATEHLSTLSEKAKPALEDLRQGLLPVLESFKVSFLSALEEYTKKLNTQ

SEQ ID NO: 15 - DNA, 513 bp, Homo sapiens
catttgctgtctcctctgctcaccagttcgcccgtccccctgccccgttcacaatgcagcctgcttctgcaaagtggtacgatcgaagggactatgtcttcattgaattttgtgttgaagacagtaaggatgttaatgtaaattttgaaaaatccaaacttacattcagttgtctcggaggaagtgataattttaagcatttaaatgaaattgatctttttcactgtattgatccaaatgattccaagcataaaagaacggacagatcaattttatgttgtttacgaaaaggagaatctggccagtcatggccaaggttaacaaaagaaagggcaaagatgatgaacaacatgggtggtgatgaggatgtagatttaccagaagtagatggagcagatgatgattcacaagacagtgatgatgaaaaaatgccagatctggagtaaggaatattgtcatcacctggattttgagaaagaaaaataacttctctgcaagatttcataattgaga

SEQ ID NO: 16 - protein, 130 aa, Homo sapiens
MQPASAKWYDRRDYVFIEFCVEDSKDVNVNFEKSKLTFSCLGGSDNFKHLNEIDLFHCIDPNDSKHKRTDRSILCCLRKGESGQSWPRLTKERAKMMNNMGGDEDVDLPEVDGADDDSQDSDDEKMPDLE

SEQ ID NO: 17 - DNA, 520 bp, Homo sapiens
atgcagcctgcttctgcaaagtggtacgatcgaagggactatgtcttcattgaattttgtgttgaagacagtaaggatgttaatgtaaattttgaaaaatccaaacttacattcagttgtctcggaggaagtgataattttaagcatttaaatgaaattgatctttttcactgtattgatccaaatgattccaagcataaaagaacggacagatcaattttatgttgtttacgaaaaggagaatctggccagtcatggccaaggttaacaaaagaaagggcaaagcttaattggcttagtgtcgacttcaataattggaaagactgggaagatgattcagatgaagacatgtctaattttgatcgtttctctgagatgatgaacaacatgggtggtgatgaggatgtagatttaccagaagtagatggagcagatgatgattcacaagacagtgatgatgaaaaaatgccagatctggagtaaggaatattgtcatcacctggattttgagaaagaaaaa

SEQ ID NO: 18 - protein, 160 aa, Homo sapiens
MQPASAKWYDRRDYVFIEFCVEDSKDVNVNFEKSKLTFSCLGGSDNFKHLNEIDLFHCIDPNDSKHKRTDRSILCCLRKGESGQSWPRLTKERAKLNWLSVDFNNWKDWEDDSDEDMSNFDRFSEMMNNMGGDEDVDLPEVDGADDDSQDSDDEKMPDLE

SEQ ID NO: 19 - DNA, 426 bp, Homo sapiens
cctgcttctgcaaagtggtacgatcgaagggactatgtcttcattgaattttgtgttgaagacagtaaggatgttaatgtaaattttgaaaaatccaaacttacattcagttgtctcggaggaagtgataattttaagcatttaaatgaaattgatctttttcactgtattgatccaaatgattccaagcataaaagaacggacagatcaattttatgttgtttacgaaaaggagaatctggccagtcatggccaaggttaacaaaagaaagggcaaagcttaattggcttagtgtcgacttcaataattggaaagactgggaagatgattcagatgaagacatgtctaattttgatcgtttctctgagaaatgccagatctggagtaaggaatattgtcatcacctggatttgaagaaagaaaaa

SEQ ID NO: 20 - protein, 142 aa, Homo sapiens
PASAKWYDRRDYVFIEFCVEDSKDVNVNFEKSKLTFSCLGGSDNFKHLNEIDLFHCIDPNDSKHKRTDRSILCCLRKGESGQSWPRLTKERAKLNWLSVDFNNWKDWEDDSDEDMSNFDRFSEKCQIWSKEYCHHLDLKKEK

SEQ ID NO: 21 - DNA, 2993 bp, Homo sapiens
gctggaggtggcctcccctccgccccagacaagaagaggccctcagccctcccccggtctcagagagccctgagaggaggcccagtccagagctcttcctccgttcccagtccacttctctagggccagtagcagacaccagccagtatgccgaggaaccagggcttctccgagcccgaatactcggccgagtactcagccgagtactccgtcagcctgccctcggaccctgaccgcggggtgggccggacccatgaaatctcggtccggaactcgggctcctgcctgtgcctgcctcgcttcatgcggcgcggctctgcggggagcagccctcgggcgcgccgagctctcccgccccagcccgcgcggggaccgtcccggagcacgcggtggccgagttcccgcacagttctagctgatcagtgctacctgtgctctggaaacccgctctgcgttcctgctggaggtggcctccccttcgccccagacaagaagaggccctcagccctcccccggtctcagagagccctgagaggaggcccagtccagagctcttcctcaaagtccagctcccctgccctcattgagaccaaggagcccaacgggagtgcccacagcagtgggtccacgtcggagaagcccgaggagcaggatgcccaggccgacaacccctcattccccaacccacgccggaggctgcgcctgcaggacctggctgaccgagtggtggatgcctctgaagatgagcacgagctcaaccagctgctcaacgaggccctgcttgagcgagagtccgcccaagtagtaaagaagagaaacaccttcctcttgtccatgcggttcatggaccccgagatggaaacccgctactcggtggagaaggagaagcagagtggggctgccttcagctgctcctgcgtcgtcctgctctgcacggccctggtcgagatactcatcgacccctggctaatgacaaactatgtgaccttcatggtgggggagattctgctcctcatcctgaccatctgctccctggctgccatctttccccgggcctttcctaagaagcttgtggccttctcaacttggattgaccggacccgctgggccaggaacacctgggccatgctcgccatcttcatcctggtgatggcaaatgtcgtggacatgctcagctgtctccagtactacacgggacccagcaatgcaacggcagggatggagacggagggcagctgcctggagaaccccaagtattacaactatgtggccgtgctgtccctcatcgccaccatcatgctggtgcaggtcagccacatggtgaagctcacgctcatgctgctcgtcgcaggcgccgtggccaccatcaacctctatgcctggcgtcccgtctttgatgaatacgaccacaagcgttttcgggagcacgacttacctatggtggccttagagcagatgcaaggattcaaccctgggctcaatggcactgacaggctgcccctggtgccttccaagtactctatgacggtgatggtgttcctcatgatgctcagcttctactacttctcccgccacgtagaaaaactggcacggacacttttcttgtggaagattgaggtccacgaccagaaggaacgtgtctatgagatgcgacgctggaacgaggccttggtcaccaacatgttgcctgagcacgtggcacgccatttcctggggtccaagaagagagatgaggagctgtatagccagacgtatgatgagattggagtcatgtttgcctccctgcccaactttgctgacttctacacagaggagagcatcaacaatggtggtattgagtgtctgcgtttcctcaatgaaatcatctcagattttgactctctcctggacaatcccaagttccgggtgatcaccaagatcaaaaccattggcagcacgtatatggcggcttcaggagtcacccccgatgtcaacaccaatggctttgccagctccaacaaggaagacaagtccgagagagagcgctggcagcacctggctgacctggccgacttcgcgctggccatgaaggatacgctcaccaacatcaacaaccagtccttcaataacttcatgctgcgcataggcatgaacaaaggcggggttctggctggggtcatcggagcccggaaaccacactacgacatctggggcaatacagtcaatgtagccagcaggatggagtccacgggggtcatgggcaacattcaggtggtagaagaaacccaagtcatcctccgagagtacggcttccgctttgtgaggcgaggccccatctttgtgaaggggaagggggagctgctgaccttcttcttgaaggggcgggataagctagccaccttccccaatggcccctctgtcacactgccccaccaggtggtggacaactcctgaatggcctcgagcctgaaacagtccaaaccggaagggagaatttattttttgaaactgaaggaagtcccgaccttcctggattgaagtgcacactcatggactttaggtttagaaacctcctcagccttcatttgttcgtggatgtgtgagctctgagggtggccctgctattcctctgcgtgcctgtagtgtccccagcataggggtcttaggcatagggctgaacagtccttccagagccctcgttccaatccctgccgtccttgcccctgaggggccctgaccactgtgagcaggagggtggcagagctgggacaaagctgcctttgccgctgggctttccgggactgtggagggagcacaggcggggaagctccacttcagacagggcttggtggggcaggacatggctcccattttgaagggaggtctccatgtggtccgagtgaggtgagacggccctcgtcctggtgttcctgatcatcttgaaaggttcttctggaactcctgtccccttagtcatgagaacagaaagtgcaatatttcctttcacctggccc

SEQ ID NO: 22 - protein, 761 aa, Homo sapiens
MPRNQGFSEPEYSAEYSAEYSVSLPSDPDRGVGRTHEISVRNSGSCLCLPRFMRRGSAGSSPRARRALPPQPARGPSRSTRWPSSRTVLADQCYLCSGNPLCVPAGGGLPFAPDKKRPSALPRSQRALRGGPVQSSSSKSSSPALIETKEPNGSAHSSGSTSEKPEEQDAQADNPSFPNPRRRLRLQDLADRVVDASEDEHELNQLLNEALLERESAQVVKKRNTFLLSMRFMDPEMETRYSVEKEKQSGAAFSCSCVVLLCTALVEILIDPWLMTNYVTFMVGEILLLILTICSLAAIFPRAFPKKLVAFSTWIDRTRWARNTWAMLAIFILVMANVVDMLSCLQYYTGPSNATAGMETEGSCLENPKYYNYVAVLSLIATIMLVQVSHMVKLTLMLLVAGAVATINLYAWRPVFDEYDHKRFREHDLPMVALEQMQGFNPGLNGTDRLPLVPSKYSMTVMVFLMMLSFYYFSRHVEKLARTLFLWKIEVHDQKERVYEMRRWNEALVTNMLPEHVARHFLGSKKRDEELYSQTYDEIGVMFASLPNFADFYTEESINNGGIECLRFLNEIISDFDSLLDNPKFRVITKIKTIGSTYMAASGVTPDVNTNGFASSNKEDKSERERWQHLADLADFALAMKDTLTNINNQSFNNFMLRIGMNKGGVLAGVIGARKPHYDIWGNTVNVASRMESTGVMGNIQVVEETQVILREYGFRFVRRGPIFVKGKGELLTFFLKGRDKLATFPNGPSVTLPHQVVDNS

SEQ ID NO: 23 - DNA, 1769 bp, Homo sapiens
cgcccgcccacggcggcggggaaatacctaggcatggaagtggcatgacagggctcgtgtccctgtcatattttccactctccacgaggtcctgcgcgcttcaatcctgcaggcagcccggtttggggatgtggtccttgctgctctgcgggttgtccatcgcccttccactgtctgtcacagcagatggatgcaaggacatttttatgaaaaatgagatactttcagcaagccagccttttgcttttaattgtacattccctcccataacatctggggaagtcagtgtaacatggtataaaaattctagcaaaatcccagtgtccaaaatcatacagtctagaattcaccaggacgagacttggattttgtttctccccatggaatggggggactcaggagtctaccaatgtgttataaagactgtaacgagattaaaggggagcggttcactgttttggaaaccaggcttttggtgagcaatgtctcggcagaggacagagggaactacgcgtgtcaagccatactgacacactcagggaagcagtacgaggttttaaatggcatcactgtgagcattacagaaagagctggatatggaggaagtgtccctaaaatcatttatccaaaaaatcattcaattgaagtacagcttggtaccactctgattgtggactgcaatgtaacagacaccaaggataatacaaatctacgatgctggagagtcaataacactttggtggatgattactatgatgaatccaaacgaatcagagaaggggtggaaacccatgtctcttttcgggaacataatttgtacacagtaaacatcaccttcttggaagtgaaaatggaagattatggccttcctttcatgtgccacgctggagtgtccacagcatacattatattacagctcccagctccggattttcgagcttacttgataggagggcttatcgccttggtggctgtggctgtgtctgttgtgtacatatacaacatttttaagatcgacattgttctttggtatcgaagtgccttccattctacagagaccatagtagatgggaagctgtatgacgcctatgtcttataccccaagccccacaaggaaagccagaggcatgccgtggatgccctggtgttgaatatcctgcccgaggtgttggagagacaatgtggatataagttgtttatattcggcagagatgaattccctggacaagccgtggccaatgtcatcgatgaaaacgttaagctgtgcaggaggctgattgtcattgtggtccccgaatcgctgggctttggcctgttgaagaacctgtcagaagaacaaatcgcggtctacagtgccctgatccaggacgggatgaaggttattctcattgagctggagaaaatcgaggactacacagtcatgccagagtcaattcagtacatcaaacagaagcatggtgccatccggtggcatggggacttcacggagcagtcacagtgtatgaagaccaagttttggaagacagtgagataccacatgccgcccagaaggtgtcggccgtttctccggtccacgtgccgcagcacacacctctgtaccgcaccgcaggcccagaactaggctcaagaagaaagaagtgtactctcacgactggctaagacttgctggactgacacctatggctggaagatgacttgttttgctccatgtctcctcattcctacacctattttctgctgcaggatgaggctagggttagcattctaga

SEQ ID NO: 24 - protein, 411 aa, Homo sapiens
MGGLRSLPMCYKDCNEIKGERFTVLETRLLVSNVSAEDRGNYACQAILTHSGKQYEVLNGITVSITERAGYGGSVPKIIYPKNHSIEVQLGTTLIVDCNVTDTKDNTNLRCWRVNNTLVDDYYDESKRIREGVETHVSFREHNLYTVNITFLEVKMEDYGLPFMCHAGVSTAYIILQLPAPDFRAYLIGGLIALVAVAVSVVYIYNIFKIDIVLWYRSAFHSTETIVDGKLYDAYVLYPKPHKESQRHAVDALVLNILPEVLERQCGYKLFIFGRDEFPGQAVANVIDENVKLCRRLIVIVVPESLGFGLLKNLSEEQIAVYSALIQDGMKVILIELEKIEDYTVMPESIQYIKQKHGAIRWHGDFTEQSQCMKTKFWKTVRYHMPPRRCRPFLRSTCRSTHLCTAPQAQN

SEQ ID NO: 25 - DNA, 1827 bp, Homo sapiens
gtcatattttccactctccacgaggtcctgcgcgcttcaatcctgcaggcagcccggtttggggatgtggtccttgctgctctgcgggttgtccatcgcccttccactgtctgtcacagcagatggatgcaaggacatttttatgaaaaatgagatactttcagcaagccagccttttgcttttaattgtacattccctcccataacatctggggaagtcagtgtaacatggtataaaaattctagcaaaatcccagtgtccaaaatcatacagtctagaattcaccaggacgagacttggattttgtttctccccatggaatggggggactcaggagtctaccaatgtgttataaagggtagagacagctgtcatagaatacatgtaaacctaactgtttttgaaaaacattggtgtgacacttccataggtggtttaccaaatttatcagatgagtacaagcaaatattacatcttggaaaagatgatagtctcacatgtcatctgcacttcccgaagagttgtgttttgggtccaataaagtggtataaagactgtaacgagattaaaggggagcggttcactgttttggaaaccaggcttttggtgagcaatgtctcggcagaggacagagggaactacgcgtgtcaagccatactgacacactcagggaagcagtacgaggttttaaatggcatcactgtgagcattagtaccactctgattgtggactgcaatgtaacagacaccaaggataatacaaatctacgatgctggagagtcaataacactttggtggatgattactatgatgaatccaaacgaatcagagaaggggtggaaacccatgtctcttttcgggaacataatttgtacacagtaaacatcaccttcttggaagtgaaaatggaagattatggccttcctttcatgtgccacgctggagtgtcaacagcatacattatattacagctcccagctccggattttcgagcttacttgataggagggcttatcgccttggtggctgtggctgtgtctgttgtgtacatatacaacatttttaagatcgacattgttctttggtatcgaagtgccttccattctacagagaccatagtagatgggaagctgtatgacgcctatgtcttataccccaagccccacaaggaaagccagaggcatgccgtggatgccctggtgttgaatatcctgcccgaggtgttggagagacaatgtggatataagttgtttatattcggcagagatgaattccctggacaagccgtggccaatgtcatcgatgaaaacgttaagctgtgcaggaggctgattgtcattgtggtccccgaatcgctgggctttggcctgttgaagaacctgtcagaagaacaaatcgcggtctacagtgccctgatccaggacgggatgaaggttattctcgttgagctggagaaaatcgaggactacacagtcatgccagagtcaattcagtacatcaaacagaagcatggtgccatccggtggcatggggacttcacggagcagtcacagtgtatgaagaccaagttttggaagacagtgagataccacatgccacccagaaggtgtcggccgtttcctccggtccagctgctgcagcacacaccttgctgccgcaccgcaggcccagaactaggctcaagaagaaagaagtgtactctcacgactggctaagacttgctggactgacacctatggctggaagatgacttgttttgctccatgtctcctcattcctacacctattttctgctgcaggatgaggctagggttagcattctaga

SEQ ID NO: 26 - protein, 550 aa, Homo sapiens
MWSLLLCGLSIALPLSVTADGCKDIFMKNEILSASQPFAFNCTFPPITSGEVSVTWYKNSSKIPVSKIIQSRIHQDETWILFLPMEWGDSGVYQCVIKGRDSCHRIHVNLTVFEKHWCDTSIGGLPNLSDEYKQILHLGKDDSLTCHLHFPKSCVLGPIKWYKDCNEIKGERFTVLETRLLVSNVSAEDRGNYACQAILTHSGKQYEVLNGITVSISTTLIVDCNVTDTKDNTNLRCWRVNNTLVDDYYDESKRIREGVETHVSFREHNLYTVNITFLEVKMEDYGLPFMCHAGVSTAYIILQLPAPDFRAYLIGGLIALVAVAVSVVYIYNIFKIDIVLWYRSAFHSTETIVDGKLYDAYVLYPKPHKESQRHAVDALVLNILPEVLERQCGYKLFIFGRDEFPGQAVANVIDENVKLCRRLIVIVVPESLGFGLLKNLSEEQIAVYSALIQDGMKVILVELEKIEDYTVMPESIQYIKQKHGAIRWHGDFTEQSQCMKTKFWKTVRYHMPPRRCRPFPPVQLLQHTPCCRTAGPELGSRRKKCTLTTG

SEQ ID NO: 27 - DNA, 1897 bp, Homo sapiens
gaattccgcccgcccacggcggcggggaaatacctaggcatggaagtggcatgacagggctcgtgtccctgtcatattttccactctccacgaggtcctgcgcgcttcaatcctgcaggcagcccggtttggggatgtggtccttgctgctctgcgggttgtccatcgcccttccactgtctgtcacagcagatggatgcaaggacatttttatgaaaaatgagatactttcagcaagccagccttttgcttttaattgtacattccctcccataacatctggggaagtcagtgtaacatggtataaaaattctagcaaaatcccagtgtccaaaatcatacagtctagaattcaccaggacgagacttggattttgtttctccccatggaatggggggactcaggagtctaccaatgtgttataaagggtagagacagctgtcatagaatacatgtaaacctaactgtttttgaaaaacattggtgtgacacttccataggtggtttaccaaatttatcagatgagtacaagcaaatattacatcttggaaaagatgatagtctcacatgtcatctgcacttcccgaagagttgtgttttgggtccaataaagtggtataaagactgtaacgagattaaaggggagcggttcactgttttggaaaccaggcttttggtgagcaatgtctcggcagaggacagagggaactacgcgtgtcaagccatactgacacactcagggaagcagtacgaggttttaaatggcatcactgtgagcattagtaccactctgattgtggactgcaatgtaacagacaccaaggataatacaaatctacgatgctggagagtcaataacactttggtggatgattactatgatgaatccaaacgaatcagagaaggggtggaaacccatgtctcttttcgggaacataatttgtacacagtaaacatcaccttcttggaagtgaaaatggaagattatggccttcctttcatgtgccacgctggagtgtcaacagcatacattatattacagctcccagctccggattttcgagcttacttgataggagggcttatcgccttggtggctgtggctgtgtctgttgtgtacatatacaacatttttaagatcgacattgttctttggtatcgaagtgccttccattctacagagaccatagtagatgggaagctgtatgacgcctatgtcttataccccaagccccacaaggaaagccagaggcatgccgtggatgccctggtgttgaatatcctgcccgaggtgttggagagacaatgtggatataagttgtttatattcggcagagatgaattccctggacaagccgtggccaatgtcatcgatgaaaacgttaagctgtgcaggaggctgattgtcattgtggtccccgaatcgctgggctttggcctgttgaagaacctgtcagaagaacaaatcgcggtctacagtgccctgatccaggacgggatgaaggttattctcgttgagctggagaaaatcgaggactacacagtcatgccagagtcaattcagtacatcaaacagaagcatggtgccatccggtggcatggggacttcacggagcagtcacagtgtatgaagaccaagttttggaagacagtgagataccacatgccacccagaaggtgtcggccgtttcctccggtccagctgctgcagcacacaccttgctgccgcaccgcaggcccagaactaggctcaagaagaaagaagtgtactctcacgactggctaagacttgctggactgacacctatggctggaagatgacttgttttgctccatgtctcctcattcctacacctattttctgctgcaggatgaggctagggttagcattctaga

SEQ ID NO: 28 - protein, 578 aa, Homo sapiens
MTGLVSLSYFPLSTRSCALQSCRQPGLGMWSLLLCGLSIALPLSVTADGCKDIFMKNEILSASQPFAFNCTFPPITSGEVSVTWYKNSSKIPVSKIIQSRIHQDETWILFLPMEWGDSGVYQCVIKGRDSCHRIHVNLTVFEKHWCDTSIGGLPNLSDEYKQILHLGKDDSLTCHLHFPKSCVLGPIKWYKDCNEIKGERFTVLETRLLVSNVSAEDRGNYACQAILTHSGKQYEVLNGITVSISTTLIVDCNVTDTKDNTNLRCWRVNNTLVDDYYDESKRIREGVETHVSFREHNLYTVNITFLEVKMEDYGLPFMCHAGVSTAYIILQLPAPDFRAYLIGGLIALVAVAVSVVYIYNIFKIDIVLWYRSAFHSTETIVDGKLYDAYVLYPKPHKESQRHAVDALVLNILPEVLERQCGYKLFIFGRDEFPGQAVANVIDENVKLCRRLIVIVVPESLGFGLLKNLSEEQIAVYSALIQDGMKVILVELEKIEDYTVMPESIQYIKQKHGAIRWHGDFTEQSQCMKTKFWKTVRYHMPPRRCRPFPPVQLLQHTPCCRTAGPELGSRRKKCTLTTG

SEQ ID NO: 29 - DNA, 1769 bp, Homo sapiens; identical to SEQ ID NO: 23

SEQ ID NO: 30 - protein, 144 aa, Homo sapiens
MTGLVSLSYFPLSTRSCALQSCRQPGLGMWSLLLCGLSIALPLSVTADGCKDIFMKNEILSASQPFAFNCTFPPITSGEVSVTWYKNSSKIPVSKIIQSRIHQDETWILFLPMEWGDSGVYQCVIKTVTRLKGSGSLFWKPGFW

SEQ ID NO: 31 - DNA, 954 bp, Homo sapiens
atgggcgactggagctttctgggaagactcttagaaaatgcacaggagcactccacggtcatcggcaaggtttggctgaccgtgctgttcatcttccgcattttggtgctgggggccgcggccgaggacgtgtggggcgatgagcagtcagacttcacctgcaacacccagcagccgggctgcgagaacgtctgctacgacagggccttccccatctcccacatccgcttctgggcgctgcagatcatcttcgtgtccacgcccaccctcatctacctgggccacgtgctgcacatcgtgcgcatggaggagaagaagaaagagagggaggaggaggagcagctgaagagagagagccccagccccaaggagccaccgcaggacaatccctcgtcgcgggacgaccgcggcagggtgcgcatggccggcgcgctgctgcggacctacgtcttcaacatcatcttcaagacgctgttcgaggtgggcttcatcgccggccagtactttctgtacggcttcgagctgaagccgctctaccgctgcgaccgctggccctgccccaacacggtggactgcttcatctccaggcccacggagaagaccatcttcatcatcttcatgctggcggtggcctgcgcgtcactgctgctcaacatgctggagatataccacctgggctggaagaagctcaagcagggcgtgaccagccgcctcggcccggacgcctccgaggccccgctggggacagccgatcccccgcccctgctgctggatgggagcggcagcagtctggaggggagcgccctggcagggacccccgaggaggaggagcaggccgtgaccaccgcggcccagatgcaccagccgcccttgcccctcggagacccaggtcgggccagcaaggccagcagggccagcagcgggcgggccagaccggaggacttggccatctag

SEQ ID NO: 32 - protein, 317 aa, Homo sapiens
MGDWSFLGRLLENAQEHSTVIGKVWLTVLFIFRILVLGAAAEDVWGDEQSDFTCNTQQPGCENVCYDRAFPISHIRFWALQIIFVSTPTLIYLGHVLHIVRMEEKKKEREEEEQLKRESPSPKEPPQDNPSSRDDRGRVRMAGALLRTYVFNIIFKTLFEVGFIAGQYFLYGFELKPLYRCDRWPCPNTVDCFISRPTEKTIFIIFMLAVACASLLLNMLEIYHLGWKKLKQGVTSRLGPDASEAPLGTADPPPLLLDGSGSSLEGSALAGTPEEEEQAVTTAAQMHQPPLPLGDPGRASKASRASSGRARPEDLAI

SEQ ID NO: 33 - DNA, 967 bp, Homo sapiens
actaacaaagaatggatcagaaaaatggaagttctttcactggatttatcctactgggtttctctgacaggcctcagctggagctagtcctctttgtggttcttttgatcttctatatcttcactttgctggggaacaaaaccatcattgtattatctcacttggacccacatcttcacaatcctatgtattttttcttctccaacctaagctttttggatctgtgttacacaaccggcattgttccacagctcctggttaatctcaggggagcagacaaatcaatctcctatggtggttgtgtagttcagctgtacatctctctaggcttgggatctacagaatgcgttctcttaggagtgatggcatttgaccgctatgcagctgtttgcaggcccctccactacacagtagtcatgcacccttgtctgtatgtgctgatggcttctacttcatgggtcattggttttgccaactccctattgcagacggtgctcatcttgcttttaacactttgtggaagaaataaattagaacactttctttgtgaggttcctccattgctcaagcttgcctgtgttgacactactatgaatgaatctgaactcttctttgtcagtgtcattattcttcttgtacctgttgcattaatcatattctcctatagtcagattgtcagggcagtcatgaggataaagtcagcaacagggcagagaaaagtgtttgggacatgtggctcccacctcacagtggtttccctgttctacggcacagctatctatgcttacctccagcccggcaacaactactctcaggatcagggcaagttcatctctctcttctacaccatcattacacccatgatcaaccccctcatatatacactgaggaacaaggatgtgaaaggagcacttaagaaggtgctctggaagaactacgactccagatgacttggagagaaagacat

SEQ ID NO: 34 - protein, 312 aa, Homo sapiens [sequence omitted]

SEQ ID NO: 35 - DNA, 1596 bp, Homo sapiens
atgctgcccatcacagaccgcctgctgcacctcctggggctggagaagacggcgttccgcatatacgcggtgtccacccttctcctcttcctgctcttcttcctgttccgcctgctgctgcggttcctgaggctctgcaggagcttctacatcacctgccgccggctgcgctgcttcccccagcctccccggcgcaactggctgctgggccacctgggcatgtaccttccaaatgaggcgggccttcaagatgagaagaaggtactggacaacatgcaccatgtactcttggtatggatgggacctgtcctgccgctgttggttctggtgcaccctgattacatcaaaccccttttgggagcctcagctgccatcgcccccaaggatgacctcttctatggcttcctaaaaccttggctaggggatgggctgctgctcagcaaaggtgacaagtggagccggcaccgtcgcctgctgacacccgccttccactttgacatcctgaagccttacatgaagatcttcaaccagagcgctgacattatgcatgctaaatggcggcatctggcagagggctcagcggtctcccttgatatgtttgagcatatcagcctcatgaccctggacagtcttcagaaatgtgtcttcagctacaacagcaactgccaagagaagatgagtgattatatctccgctatcattgaactgagcgctctgtctgtccggcgccagtatcgcttgcaccactacctcgacttcatttactaccgctcggcggatgggcggaggttccggcaggcctgtgacatggtgcaccacttcaccactgaagtcatccaggaacggcggcgggcactgcgtcagcagggggccgaggcctggcttaaggccaagcaggggaagaccttggactttattgatgtgctgctcctggccagggatgaagatggaaaggaactgtcagacgaggatatccgagccgaagcagacaccttcatgtttgagggtcacgacacaacatccagtgggatctcttggatgctgttcaatttggcaaagtatccggaataccaggagaaatgccgagaagagattcaggaagtcatgaaaggccgggagctggaggagctggagtgggacgatctgactcagctgccctttacaactatgtgcattaaggagagcctgcgccagtacccacctgtcactcttgtctctcgccaatgcacggaggacatcaagctcccagatgggcgcatcatccccaaaggaatcatctgcttggtcagcatctatggaacccaccacaaccccacagtgtggcctgactccaaggtgtacaacccctaccgctttgacccggacaacccacagcagcgctctccactggcctatgtgcccttctctgcaggacccaggaattgcatcggacagagcttcgccatggccgagttgcgcgtggttgtggcactaacactgctacgtttccgcctgagcgtggaccgaacgcgcaaggtgcggcggaagccggagctcatactgcgcacggagaacgggctctggctcaaggtggagccgctgcctccgcgggcctga

SEQ ID NO: 36 - protein, 532 aa, Homo sapiens
  VARIANT (532): Wherein Xaa is any amino acid.
MLPITDRLLHLLGLEKTAFRIYAVSTLLLFLLFFLFRLLLRFLRLCRSFYITCRRLRCFPQPPRRNWLLGHLGMYLPNEAGLQDEKKVLDNMHHVLLVWMGPVLPLLVLVHPDYIKPLLGASAAIAPKDDLFYGFLKPWLGDGLLLSKGDKWSRHRRLLTPAFHFDILKPYMKIFNQSADIMHAKWRHLAEGSAVSLDMFEHISLMTLDSLQKCVFSYNSNCQEKMSDYISAIIELSALSVRRQYRLHHYLDFIYYRSADGRRFRQACDMVHHFTTEVIQERRRALRQQGAEAWLKAKQGKTLDFIDVLLLARDEDGKELSDEDIRAEADTFMFEGHDTTSSGISWMLFNLAKYPEYQEKCREEIQEVMKGRELEELEWDDLTQLPFTTMCIKESLRQYPPVTLVSRQCTEDIKLPDGRIIPKGIICLVSIYGTHHNPTVWPDSKVYNPYRFDPDNPQQRSPLAYVPFSAGPRNCIGQSFAMAELRVVVALTLLRFRLSVDRTRKVRRKPELILRTENGLWLKVEPLPPRAX

SEQ ID NO: 37 - DNA, 3025 bp, Homo sapiens
acaggtgcctgggggtcaggcttccgcatgcgggctgcagttgctggcattgccttccgcaggaggcgtcagaaacagtggctttccaagaagtccacctatcaggcattattggattcagtcacaacagatgaagacagcaccaggttccaaatcatcaatgaagcaagtaaggtgaggcgtcagaaacagtggctttccaagaagtccacctatcaggcattattggattcagtcacaacagatgaagacagcaccaggttccaaatcatcaatgaagcaagtaaggtgcctctcctggctgaaatttatggtatagaaggaaacattttcaggcttaaaattaatgaagagactcctctaaaacccagatttgaagttccggatgtcctcacaagcaagccaagcactgtaaggatttcatgctctggggacacaggcagtctgatattggcagatggaaaaggagacctgaagtgccatatcacagcaaacccattcaaggtagacttggtgtctgaagaagaggttgtgattagcataaattccctgggccaattatactttgagcatggcagggcccctagggtctctttctcggataaggttaatctcacgcttggtagcatatgggataagatcaagaaccttttctctaggcaaggatcaaaagacccagctgagggcgatggggcccagcctgaggaaacacccagggatggcgacaagccagaggagactcaggggaaggcagagaaagatgagccaggagcctgggaggagacattcaaaactcactctgacagcaagccgtatggcccttcttctattggtttggatttctccttgcatggatttgagcatctttatgggatcccacaacatgcagaatcacaccaacttaaaaatactggggatggagatgcttaccgtctttataacctggatgtctatggataccaaatatatgataaaatgggcatttatggttcagtaccttatctcctggcccacaaactgggcagaactataggtattttctggctgaatgcctcggaaacactggtggagatcaatacagagcctgcagggatagtcatctttggtcctgtctctttgatttatcaaagccagggagatacacctctaacaactcatgtgcactggatgtcagagagtggcatcattgatgtttttctgctgacaggacctacaccttctgatgtcttcaaacagtactcacaccttacaggtacacaagccatgccccctcttttctctttgggataccaccagtgccgctggaactatgaagatgagcaggatgtaaaagcagtggatgcagggtttgatgagcatgacattccttatgatgccatgtggctggacatagagcacactgagggcaagaggtacttcacctgggacaaaaacagattcccaaaccccaagaggatgcaagagctgctcaggagcaaaaagcgtaagcttgtggtcatcagtgatccccacatcaagattgaacctgactactcagtatatgtgaaggccaaagatcagggcttctttgtgaagaatcaggaaggggaagactttgaaggggtgtgttggccaggtatgaaatcatacctggatttcaccaatcccaaggtcagagagtggtattcaagtatgttcagttccaattgtgatggatctacggacatcctcttcctttggaatgacatgaatgagccttctgtctttagagggccagagcaaaccatgcagaagaatgccattcatcatggcaattgggagcacagagagctccacaacatctacggtttttatatggctactgcagaaggactgataaaacgatctaaagggaaggagagaccctttgttcttacacgttctttctttgctggatcacaaaagtatggtgccgtgtggacaggcgacaacacagcagaatggagcaacttgaaaatttctatcccaatgttactcactctcagcattactgggatctctttttgcggagctgacataggcgggttcattgggaatccagagacagagctgctagtgcgttggtaccaggctggagcctaccagcccttcttccgtggccatgccaccatgaacaccaagcgacgagagccctggctctttggggaggaacacacccgactcatccgagaagccatcagagagcgctatggcctcctgccatattggtattctctgttctaccatgcacacgtggcttcccaacctgtcatgaggcctctgtgggtagagttccctgatgaactaaagacttttgatatggaagatgaatacatgttagggagtgcattattggttcatccagtcacagaaccaaaagccaccacagttgatgtgtttcttccaggatcaaatgaggtagtctggtatgactataagacatttgctcattgggaaggagggtgtactgtaaagatcccagtactgttacagattccagtgtttcagcgaggtggaagtgtgataccaataaagacaactgtaggaaaatccacaggctggatgactgaatcctcctatggactccgggttgctctaagcactctccagggttcttcagtgggtgagttatatcttgatgatggccattcattccaatacctccaccagaagcaatttttgcacaggaagttttcattctgttccagtgttctggtggcctcctctccagtatctcaaggacacttacataccccactcagcatgacaaaagccctgcttttcactgtatcgtctccagccagcgtgaaaatgcggcttcactacagcccagagaaaagggccaggtttagtcattgtgccaaaacatccatcctgagcctggagaagctctcactcaacattgccactgactgggaggtccgcatcatatgacaaagaactgcccctggtgatgtgagcagggacctgcctgcccctttcaacctttcccctcaccttttttgagatttttgctgcaatctgtttg

SEQ ID NO: 38 - protein, 967 aa, Homo sapiens
MRAAVAGIAFRRRRQKQWLSKKSTYQALLDSVTTDEDSTRFQIINEASKVRRQKQWLSKKSTYQALLDSVTTDEDSTRFQIINEASKVPLLAEIYGIEGNIFRLKINEETPLKPRFEVPDVLTSKPSTVRISCSGDTGSLILADGKGDLKCHITANPFKVDLVSEEEVVISINSLGQLYFEHGRAPRVSFSDKVNLTLGSIWDKIKNLFSRQGSKDPAEGDGAQPEETPRDGDKPEETQGKAEKDEPGAWEETFKTHSDSKPYGPSSIGLDFSLHGFEHLYGIPQHAESHQLKNTGDGDAYRLYNLDVYGYQIYDKMGIYGSVPYLLAHKLGRTIGIFWLNASETLVEINTEPAGIVIFGPVSLIYQSQGDTPLTTHVHWMSESGIIDVFLLTGPTPSDVFKQYSHLTGTQAMPPLFSLGYHQCRWNYEDEQDVKAVDAGFDEHDIPYDAMWLDIEHTEGKRYFTWDKNRFPNPKRMQELLRSKKRKLVVISDPHIKIEPDYSVYVKAKDQGFFVKNQEGEDFEGVCWPGMKSYLDFTNPKVREWYSSMFSSNCDGSTDILFLWNDMNEPSVFRGPEQTMQKNAIHHGNWEHRELHNIYGFYMATAEGLIKRSKGKERPFVLTRSFFAGSQKYGAVWTGDNTAEWSNLKISIPMLLTLSITGISFCGADIGGFIGNPETELLVRWYQAGAYQPFFRGHATMNTKRREPWLFGEEHTRLIREAIRERYGLLPYWYSLFYHAHVASQPVMRPLWVEFPDELKTFDMEDEYMLGSALLVHPVTEPKATTVDVFLPGSNEVVWYDYKTFAHWEGGCTVKIPVLLQIPVFQRGGSVIPIKTTVGKSTGWMTESSYGLRVALSTLQGSSVGELYLDDGHSFQYLHQKQFLHRKFSFCSSVLVASSPVSQGHLHTPLSMTKALLFTVSSPASVKMRLHYSPEKRARFSHCAKTSILSLEKLSLNIATDWEVRII

SEQ ID NO: 39 - DNA, 4483 bp, Homo sapiens
aacgctagtttgggcctgaaaaattccaggagcaagagtcaagatttgtcactccatgagaatctggaggggactcccttcccagaaacttgacgatgaagtactggttgtaattttagaaagacacccaatcggcttttttaaaagatcgcccagggcccttgtcctgagagctgggagctggtcggagtgacagagaagccatggaagcagcagtgaaagaggaaataagtgttgaagatgaagctgtagataaaaacattttcagagactgtaacaagatcgcattttacaggcgtcagaaacagtggctttccaagaagtccacctatcaggcattattggattcagtcacaacagatgaagacagcaccaggttccaaatcatcaatgaagcaagtaaggttcctctcctggctgaaatttatggtatagaaggaaacattttcaggcttaaaattaacgaagagactcctctaaaacccagatttgaagttccggatgtcctcacaagcaagccaagcactgtaaggctgatttcatgctctggggacacaggcagtctgatattggcagatggaaaaggagacctgaagtgccatatcacagcaaacccattcaaggtagacttggtgtctgaagaagaggttgtgattagcataaattccctgggccaattatactttgagcatctacagattcttcacaaacaaagagctgctaaagaaaatgaggaggagacatcagtggacacctctcaggaaaatcaagaagatctgggcctgtgggaagagaaatttggaaaatttgtggatatcaaagctaatggcccttcttctattggtttggatttctccttgcatggatttgagcatctttatgggatcccacaacatgcagaatcacaccaacttaaaaatactggtgatggagatgcttaccgtctttataacctggatgtctatggataccaaatatatgataaaatgggcatttatggttcagtaccttatctcctggcccacaaactgggcagaactataggtattttctggctgaatgcctcggaaacactggtggagatcaatacagagcctgcagtagagtacacactgacccagatgggcccagttgctgctaaacaaaaggtcagatctcgcactcatgtgcactggatgtcagagagtggcatcattgatgtttttctgctgacaggacctacaccttctgatgtcttcaaacagtactcacaccttacaggcacacaagccatgccccctcttttctctttgggataccaccagtgccgctggaactatgaagatgagcaggatgtaaaagcagtggatgcagggtttgatgagcatgacattccttatgatgccatgtggctggacatagagcacactgagggcaagaggtacttcacctgggacaaaaacagattcccaaaccccaagaggatgcaagagctgctcaggagcaaaaagcgtaagcttgtggtcatcagtgatccccacatcaagattgatcctgactactcagtatatgtgaaggccaaagatcagggcttctttgtgaagaatcaggaaggggaagactttgaaggggtgtgttggccaggtctctcctcttacctggatttcaccaatcccaaggtcagagagtggtattcaagtctttttgctttccctgtttatcagggatctacggacatcctcttcctttggaatgacatgaatgagccttctgtctttagagggccagagcaaaccatgcagaagaatgccattcatcatggcaattgggagcacagagagctccacaacatctacggtttttatcatcaaatggctactgcagaaggactgataaaacgatctaaagggaaggagagaccctttgttcttacacgttctttctttgctggatcacaaaagtatggtgccgtgtggacaggcgacaacacagcagaatggagcaacttgaaaatttctatcccaatgttactcactctcagcattactgggatctctttttgcggagctgacataggcgggttcattgggaatccagagacagagctgctagtgcgttggtaccaggctggagcctaccagcccttcttccgtggccatgccaccatgaacaccaagcgacgagagccctggctctttggggaggaacacacccgactcatccgagaagccatcagagagcgctatggcctcctgccatattggtattctctgttctaccatgcacacgtggcttcccaacctgtcatgaggcctctgtgggtagagttccctgatgaactaaagacttttgatatggaagatgaatacatgctggggagtgcattattggttcatccagtcacagaaccaaaagccaccacagttgatgtgtttcttccaggatcaaatgaggtctggtatgactataagacatttgctcattgggaaggagggtgtactgtaaagatcccagtagccttggacactattccagtgtttcagcgaggtggaagtgtgataccaataaagacaactgtaggaaaatccacaggctggatgactgaatcctcctatggactccgggttgctctaagcactaagggttcttcagtgggtgagttatatcttgatgatggccattcattccaatacctccaccagaagcaatttttgcacaggaagttttcattctgttccagtgttctgatcaatagttttgctgaccagaggggtcattatcccagcaagtgtgtggtggagaagatcttggtcttaggcttcaggaaggagccatcttctgtgactacccactcatctgatggtaaagatcagcctgtggcttttacgtattgtgccaaaacatccatcctgagcctggagaagctctcactcaacattgccactgactgggaggtccgcatcatatgacaaagaactgcccctggtgatgtgagcagggacctgcctgcccctttcaacctttcccctcaccttttttgagatttttgctgcaatctgtttgccttccctgaatcaaaataatctttcattcgtcaccattatactaatgaacaatagatttcatgtttcaaaatttcagattttacatgttaagatgtactaacaatattccttgtatcaaacatctccttttctccctgatacatagccctgagacatttatagcgttcaggagtcttctattgcttccattccttcagcagggctgcgtgggtctgttttaacgtgggccaagcctacctgggcagcccatttgccagggcttgcctcaggccatgcagcattggcgctctggctgcagcagctgagttgctcaaggccagtgtccaagtggacagcagcctctggtactccccccagttatcttccacccacatggactgggcagagcagccctcttctgtgtgcactgcatacgctgcagccgtgggagttattctcccctagagatcgacttggcagcacgaaggattcttttctctttcatgcttctcaggctcaatagtttctaattaatcttaaaatccatgtcttttacattgtttttttaattaagtgctgtttactaaccaaataatatttataacatgagtaagctataattaataacaatgaaataaatacccatgtacccaccactggacttcagaagtagaactcatgactgggactaggatgaggcaagggagaccctggccttgggcacaaaatgtaagggatgccaaaaaaatacagtaatcaaagtaagtaatatttcaatccaatatttttaaaaatcagaattaatgcaaaaaaaaccatgatgaacaaaatattaaaatttaaaataaagacaggattagtattactgagttttccttttgtcccaggctttaatatggcttggcatggggcagaacattacaacataccagtcgtgtcatggtgcccaaggctccacagacctcagtggctccctgctgcctgccacagcatctgttttagcagcctcgactcctcagcactcctcagcacacacctcttcttatcaggcttcctccacttagcaacttgctaacggccacctctgtgccttctgatccctgggcgccaatatcctcctgcccttaccatccttccaggcccaacttaaatcccactttcccatgaagcctaactgcgtgaacacccctacccccatacccattagcagtgattttgcccttccccgtaatgctgtcccacttataactgtgctctacttagcattctcagggatcataccttaatgttttcagtatgtctgcgttctcctactagattgtatgtccctcaagagcatgttctgtttctcttctgtctgacagagcactattatacctgactttcagtaactgttagctgtgattagttagctggtggatttaattgattaaaaaattacgattgaatgtaaaaaaaaa

SEQ ID NO: 40 - protein, 914 aa, Homo sapiens [sequence omitted]

SEQ ID NO: 41 - DNA, 3015 bp, Homo sapiens
aacgctagtttgggcctgaaaaattccaggagcaagagtcaagatttgtcactccatgagaatctggaggggactcccttcccagaaacttgacgatgaagtactggttgtaattttagaaagacacccaatcggcttttttaaaagatcgcccagggcccttgtcctgagagctgggagctggtcggagtgacagagaagccatggaagcagcagtgaaagaggaaataagtgttgaagatgaagctgtagataaaaacattttcagagactgtaacaagatcgcattttacaggcgtcagaaacagtggctttccaagaagtccacctatcaggcattattggattcagtcacaacagatgaagacagcaccaggttccaaatcatcaatgaagcaagtaaggttcctctcctggctgaaatttatggtatagaaggaaacattttcaggcttaaaattaacgaagagactcctctaaaacccagatttgaagttccggatgtcctcacaagcaagccaagcactgtaaggctgatttcatgctctggggacacaggcagtctgatattggcagatggaaaaggagacctgaagtgccatatcacagcaaacccattcaaggtagacttggtgtctgaagaagaggttgtgattagcataaattccctgggccaattatactttgagcatctacagattcttcacaaacaaagagctgctaaagaaaatgaggaggagacatcagtggacacctctcaggaaaatcaagaagatctgggcctgtgggaagagaaatttggaaaatttgtggatatcaaagctaatggcccttcttctattggtttggatttctccttgcatggatttgagcatctttatgggatcccacaacatgcagaatcacaccaacttaaaaatactggtgatggagatgcttaccgtctttataacctggatgtctatggataccaaatatatgataaaatgggcatttatggttcagtaccttatctcctggcccacaaactgggcagaactataggtattttctggctgaatgcctcggaaacactggtggagatcaatacagagcctgcagtagagtacacactgacccagatgggcccagttgctgctaaacaaaaggtcggatctcgcactcatgtgcactggatgtcagagagtggcatcattgatgtttttctgctgacaggacctacaccttctgatgtcttcaaacagtactcacaccttacaggcacacaagccatgccccctcttttctctttgggataccaccagtgccgctggaactatgaagatgagcaggatgtaaaagcagtggatgcagggtttgatgagcatgacattccttatgatgccatgtggctggacatagagcacactgagggcaagaggtacttcacctgggacaaaaacagattcccaaaccccaagaggatgcaagagctgctcaggagcaaaaagcgtaagcttgtggtcatcagtgatccccacatcaagattgatcctgactactcagtatatgtgaaggccaaagatcagggcttctttgtgaagaatcaggaaggggaagactttgaaggggtgtgttggccaggtctctcctcttacctggatttcaccaatcccaaggtcagagagtggtattcaagtctttttgctttccctgtttatcagggatctacggacatcctcttcctttggaatgacatgaatgagccttctgtctttagagggccagagcaaaccatgcagaagaatgccattcatcatggcaattgggagcacagagagctccacaacatctacggtttttatcatcaaatggctactgcagaaggactgataaaacgatctaaagggaaggagagaccctttgttcttacacgttctttctttgctggatcacaaaagtatggtgccgtgtggacaggcgacaacacagcagaatggagcaacttgaaaatttctatcccaatgttactcactctcagcattactggggtctctttttgcggagctgacataggcgggttcattgggaatccagagacagagctgctagtgcgttggtaccaggctggagcctaccagcccttcttccgtggccatgccaccatgaacaccaagcgacgagagccctggctctttggggaggaacacacccgactcatccgagaagccatcagagagcgctatggcctcctgccatattggtattctctgttctaccatgcacacgtggcttcccaacctgtcatgaggcctctgtgggtagagttccctgatgaactaaagacttttgatatggaagatgaatacatgctggggagtgcattattggttcatccagtcacagaaccaaaagccaccacagttgatgtgtttcttccaggatcaaatgaggtctggtatgactataagacatttgctcattgggaaggagggtgtactgtaaagatcccagtagccttggacactattccagtgtttcagcgaggtggaagtgtgataccaataaagacaactgtaggaaaatccacaggctggatgactgaatcctcctatggactccgggttgctctaagcactaagggttcttcagtgggtgagttatatcttgatgatggccattcattccaatacctccaccagaagcaatttttgcacaggaagttttcattctgttccagtgttctgatcaatagttttgctgaccagaggggtcactatcccagcaagtgtgtggtggagaagatcttggtcttaggcttcaggaaggagccatcttctgtgactacccactcatctgatggtaaagatcagcctgtggcttttacgtattgtgccaaaacatccatcctgagcctggagaagctctcactcaacattgccactgactgggaggtccgcatcatatgacaaagaactgcccctggtgatgtgagcagggacctgcctgcccctttcaacctttcccctcaccttt

SEQ ID NO: 42 - protein, 914 aa, Homo sapiens
MEAAVKEEISVEDEAVDKNIFRDCNKIAFYRRQKQWLSKKSTYQALLDSVTTDEDSTRFQIINEASKVPLLAEIYGIEGNIFRLKINEETPLKPRFEVPDVLTSKPSTVRLISCSGDTGSLILADGKGDLKCHITANPFKVDLVSEEEVVISINSLGQLYFEHLQILHKQRAAKENEEETSVDTSQENQEDLGLWEEKFGKFVDIKANGPSSIGLDFSLHGFEHLYGIPQHAESHQLKNTGDGDAYRLYNLDVYGYQIYDKMGIYGSVPYLLAHKLGRTIGIFWLNASETLVEINTEPAVEYTLTQMGPVAAKQKVGSRTHVHWMSESGIIDVFLLTGPTPSDVFKQYSHLTGTQAMPPLFSLGYHQCRWNYEDEQDVKAVDAGFDEHDIPYDAMWLDIEHTEGKRYFTWDKNRFPNPKRMQELLRSKKRKLVVISDPHIKIDPDYSVYVKAKDQGFFVKNQEGEDFEGVCWPGLSSYLDFTNPKVREWYSSLFAFPVYQGSTDILFLWNDMNEPSVFRGPEQTMQKNAIHHGNWEHRELHNIYGFYHQMATAEGLIKRSKGKERPFVLTRSFFAGSQKYGAVWTGDNTAEWSNLKISIPMLLTLSITGVSFCGADIGGFIGNPETELLVRWYQAGAYQPFFRGHATMNTKRREPWLFGEEHTRLIREAIRERYGLLPYWYSLFYHAHVASQPVMRPLWVEFPDELKTFDMEDEYMLGSALLVHPVTEPKATTVDVFLPGSNEVWYDYKTFAHWEGGCTVKIPVALDTIPVFQRGGSVIPIKTTVGKSTGWMTESSYGLRVALSTKGSSVGELYLDDGHSFQYLHQKQFLHRKFSFCSSVLINSFADQRGHYPSKCVVEKILVLGFRKEPSSVTTHSSDGKDQPVAFTYCAKTSILSLEKLSLNIATDWEVRII

SEQ ID NO: 43 - DNA, 3102 bp, Homo sapiens
tactggttgtaattttagaaagacacccaatcggcttttttaaaagatcgcccagggcccttgtcctgagagctgggagctggtcggagtgacagagaagccatggaagcagcagtgaaagaggaaataagtgttgaagatgaagctgtagataaaaacattttcagagactgtaacaagatcgcattttacaggcgtcagaaacagtggctttccaagaagtccacctatcgggcattattggattcagtcacaacagatgaagacagcaccaggttccaaatcatcaatgaagcaagtaaggttcctctcctggctgaaatttatggtatagaaggaaacattttcaggcttaaaattaacgaagagactcctctaaaacccagatttgaagttccggatgtcctcacaagcaagccaagcactgtaaggctgatttcatgctctggggacacaggcagtctgatattggcagatggaaaaggagacctgaagtgccatatcacagcaaacccattcaaggtagacttggtgtctgaagaagaggttgtgattagcataaattccctgggccaattatactttgagcatctacagattcttcacaaacaaagagctgctaaagaaaatgaggaggagacatcagtggacacctctcaggaaaatcaagaagatctgggcctgtgggaagagaaatttggaaaatttgtggatatcaaagctaatggcccttcttctattggtttggatttctccttgcatggatttgagcatctttatgggatcccacaacatgcagaatcacaccaacttaaaaatactggagatgcttaccgtctttataacctggatgtctatggataccaaatatatgataaaatgggcatttatggttcagtaccttatctcctggcccacaaactgggcagaactataggtattttctggctgaatgcctcggaaacactggtggagatcaatacagagcctgcagtagagtacacactgacccagatgggcccagttgctgctaaacaaaaggtcagatctcgcactcatgtgcactggatgtcagagagtggcatcattgatgtttttctgctgacaggacctacaccttctgatgtcttcaaacagtactcacaccttacaggtacgcaagccatgccccctcttttctctttgggataccaccagtgccgctggaactatgaagatgagcaggatgtaaaagcagtggatgcagggtttgatgagcatgacattccttatgatgccatgtggctggacatagagcacactgagggcaagaggtacttcacctgggacaaaaacagattcccaaaccccaagaggatgcaagagctgctcaggagcaaaaagcgtaagcttgtggtcatcagtgatccccacatcaagattgaacctgactactcagtatatgtgaaggccaaagatcagggcttctttgtgaagaatcaggaaggggaagactttgaaggggtgtgttggccaggtctctcctcttacctggatttcaccaatcccaaggtcagagagtggtattcaagtctttttgctttccctgtttatcagggatctacggacatcctcttcctttggaatgacatgaatgagccttctgtctttagagggccagagcaaaccatgcagaagaatgccattcatcatggcaattgggagcacagagagctccacaacatctacggtttttatcatcaaatggctactgcagaaggactgataaaacgatctaaagggaaggagagaccctttgttcttacacgttctttctttgctggatcacaaaagtatggtgccgtgtggacaggcgacaacacagcagaatggagcaacttgaaaatttctatcccaatgttactcactctcagcattactgggatctctttttgcggagctgacataggcgggttcattgggaatccagagacagagctgctagtgcgttggtaccaggctggagcctaccagcccttcttccgtggccatgccaccatgaacaccaagcgacgagagccctggctctttggggaggaacacacccgactcatccgagaagccatcagagagcgctatggcctcctgccatattggtattctctgttctaccatgcacacgtggcttcccaacctgtcatgaggcctctgtgggtagagttccctgatgaactaaagacttttgatatggaagatgaatacatgttagggagtgcattattggttcatccagtcacagaaccaaaagccaccacagttgatgtgtttcttccaggatcaaatgaggtatggtatgactataagacatttgctcattgggaaggagggtgtactgtaaagatcccagtagccttggacactattccagtgtttcagcgaggtggaagtgtgataccaataaagacaactgtaggaaaatccacaggctggatgactgaatcctcctatggactccgggttgctctaagcactcagggttcttcagtgggtgagttatatcttgatgatggccattcattccaatacctccaccagaagcaatttttgcacaggaagttttcattctgttccagtgttctgatcaatagttttgctgaccagaggggtcattatcccagcaagtgtgtggtggagaagatcttggtcttaggcttcaggaaggagccatcttctgtgactacccactcatctgatggtaaagatcagcctgtggcttttacgtattgtgccaaaacatccatcctgagcctggagaagctctcactcaacattgccactgactgggaggtccgcatcatatgacaaagaactgcccctggtgatgtgagcagggacctgcctgcccctttcaacctttcccctcaccttttttgagatttttgctgcaatctgtttgtcttccctgaatcaaaataatctttcattcgtcaccattatactaatgaacaatagatttcatgtttcaaaatttcagattttacatgttaagatgtactaacaatattccttgtatcaaacatctccttttctccctgatacatagccctgagacattatagcgtc

SEQ ID NO: 44 - protein, 912 aa, Homo sapiens
MEAAVKEEISVEDEAVDKNIFRDCNKIAFYRRQKQWLSKKSTYRALLDSVTTDEDSTRFQIINEASKVPLLAEIYGIEGNIFRLKINEETPLKPRFEVPDVLTSKPSTVRLISCSGDTGSLILADGKGDLKCHITANPFKVDLVSEEEVVISINSLGQLYFEHLQILHKQRAAKENEEETSVDTSQENQEDLGLWEEKFGKFVDIKANGPSSIGLDFSLHGFEHLYGIPQHAESHQLKNTGDAYRLYNLDVYGYQIYDKMGIYGSVPYLLAHKLGRTIGIFWLNASETLVEINTEPAVEYTLTQMGPVAAKQKVRSRTHVHWMSESGIIDVFLLTGPTPSDVFKQYSHLTGTQAMPPLFSLGYHQCRWNYEDEQDVKAVDAGFDEHDIPYDAMWLDIEHTEGKRYFTWDKNRFPNPKRMQELLRSKKRKLVVISDPHIKIEPDYSVYVKAKDQGFFVKNQEGEDFEGVCWPGLSSYLDFTNPKVREWYSSLFAFPVYQGSTDILFLWNDMNEPSVFRGPEQTMQKNAIHHGNWEHRELHNIYGFYHQMATAEGLIKRSKGKERPFVLTRSFFAGSQKYGAVWTGDNTAEWSNLKISIPMLLTLSITGISFCGADIGGFIGNPETELLVRWYQAGAYQPFFRGHATMNTKRREPWLFGEEHTRLIREAIRERYGLLPYWYSLFYHAHVASQPVMRPLWVEFPDELKTFDMEDEYMLGSALLVHPVTEPKATTVDVFLPGSNEVWYDYKTFAHWEGGCTVKIPVALDTIPVFQRGGSVIPIKTTVGKSTGWMTESSYGLRVALSTQGSSVGELYLDDGHSFQYLHQKQFLHRKFSFCSSVLINSFADQRGHYPSKCVVEKILVLGFRKEPSSVTTHSSDGKDQPVAFTYCAKTSILSLEKLSLNIATDWEVRII

SEQ ID NO: 45 - DNA, 7876 bp, Homo sapiens
  misc_feature (746): Wherein n is a or t or c or g.
tcaggatgaaggtaaaaggcagaggaatcacctgcttgctggtctcctttgctgtgatctgcctggtcgccacccctgggggcaaggcctgtcctcgccgctgtgcctgttatatgcctacggaggtacactgcacatttcggtacctgacttccatcccagacagcatcccgcccaatgtggaacgcatcaatttagggtacaacagcttggttagattgatggaaacagatttttctggcctgaccaaactggagttactcatgcttcacagcaatggcattcacacaatccctgacaagaccttctcagatttgcaggccttgcaggtgagactgatggtcttaaaaatgagctataataaagtccgaaaacttcagaaagatactttttatggcctcaggagcttgacacgattgcacatggaccacaacaatattgagtttataaacccagaggttttttatgggctcaactttctccgcctggtgcacttggaaggaaatcagctcactaagctccacccagatacatttgtctctttgagctacctccagatatttaaaatctctttcattaagttcctatacttgtctgataacttcctgacctccctccctcaagagatggtctcctatatgcctgacctagacagcctttacctgcatggaaacccatggacctgtgattgccatttaaagtggttgtctgactggatacaggagaagccaggtatctatattgtnttaccagatgtaataaaatgcaaaaaagatagaagtccctctagtgctcagcagtgtccactttgcatgaaccctaggacttctaaaggcaagccgttagctatggtctcagctgcagctttccagtgtgccaagccaaccattgactcatccctgaaatcaaagagcctgactattctggaagacagtagttctgctttcatctctccccaaggtttcatggcaccctttggctccctcactttgaatatgacagatcagtctggaaatgaagctaacatggtctgcagtattcaaaagccctcaaggacatcacccattgcattcactgaagaaaatgactacatcgtgctaaatacttcattttcaacatttttggtgtgcaacatagattacggtcacattcagccagtgtggcaaattttggctttgtacagtgattctcctctgatactagaaaggagccacttgcttagtgaaacaccgcagctctattacaaatataaacaggtggctcctaagcctgaagacatttttaccaacatagaggcagatctcagagcagatccctcttggttaatgcaagaccaaatttccttgcagctgaacagaactgccaccacattcagtacattacagatccagtactccagtgatgctcaaatcactttaccaagagcagagatgaggccagtgaaacacaaatggactatgatttcaagggataacaatactaagctggaacatactgtcttggtaggtggaaccgttggcctgaactgcccaggccaaggagaccccaccccacacgtggattggcttctagctgatggaagtaaagtgagagccccttatgtcagtgaggatggacggatcctaatagacaaaagtggaaaattggaactccagatggctgatagttttgacacaggcgtatatcactgtataagcagcaattatgatgatgcagatattctcacctataggataactgtggtagaacctttggtcgaagcctatcaggaaaatgggattcatcacacagttttcattggtgaaacacttgatcttccatgccattctactggtatcccagatgcctctattagctgggttattccaggaaacaatgtgctctatcagtcatcaagagacaagaaagttctaaacaatggcacattaagaatattacaggtcaccccgaaagaccaaggttattatcgctgtgtggcagccaacccatcaggggttgattttttgattttccaagtttcagtcaagatgaaaggacaaaggcccttggagcatgatggagaaacagagggatctggacttgatgagtccaatcctattgctcatcttaaggagccaccaggtgcacaactccgtacatctgctctgatggaggctgaggttggaaaacacacctcaagcacaagtaagaggcacaactatcgggaattaacactccagcgacgtggagattcaacacatcgacgttttagggagaataggaggcatttccctccctctgctaggagaattgacccacaacattgggcggcactgttggagaaagctaaaaagaatgctatgccagacaagcgagaaaataccacagtgagcccacccccagtggtcacccaactcccaaacatacctggtgaagaagacgattcctcaggcatgctcgctctacatgaggaatttatggtcccggccactaaagctttgaaccttccagcaaggacagtgactgctgactccagaacaatatctgatagtcctatgacaaacataaattatggcacagaattctctcctgttgtgaattcacaaatactaccacctgaagaacccacagatttcaaactgtctactgctattaaaactacagccatgtcaaagaatataaacccaaccatgtcaagccaaatacaaggcacaaccaatcaacattcatccactgtctttccactgctacttggagcaactgaatttcaggactctgaccagatgggaagaggaagagagcatttccaaagtagacccccaataacagtaaggactatgatcaaagatgtcaatgtcaaaatgcttagtagcaccaccaacaaactattattagagtcagtaaataccacaaatagtcatcagacatctgtaagagaagtgagtgaacccaggcacaatcacttctattctcacactactcaaatacttagcacctccacgttcccttcagatccacacacagctgctcattctcagtttccgatccctagaaatagtacagttaacatcccgctgttcagacgctttgggaggcagaggaaaattggcggaagggggcggattatcagcccatatagaactccagttctgcgacggcatagatacagcattttcaggtcaacaaccagaggttcttctgaaaaaagcactactgcattctcagccacagtgctcaatgtgacatgtctgtcctgtcttcccagggagaggctcaccactgccacagcagcattgtcttttccaagtgctgctcccatcaccttccccaaagctgacattgctagagtcccatcagaagagtctacaactctagtccagaatccactattactacttgagaacaaacccagtgtagagaaaacaacacccacaataaaatatttcaggactgaaatttcccaagtgactccaactggtgcagtcatgacatatgctccaacatccatacccatggaaaaaactcacaaagtaaacgccagttacccacgtgtgtctagcaccaatgaagctaaaagagattcagtgattacatcgtcactttcaggtgctatcaccaagccaccaatgactattatagccattacaaggttttcaagaaggaaaattccctggcaacagaactttgtaaataaccataacccaaaaggcagattaaggaatcaacataaagttagtttacaaaaaagcacagctgtgatgcttcctaaaacatctcctgctttaccacagagacaaagtctcccctcgcaccacactacgaccaaaacacacaatcctggaagtcttccaacaaagaaggagcttcccttcccaccccttaaccctatgcttcctagtattataagcaaagactcaagtacaaaaagcatcatatcaacgcaaacagcaataccagcaacaactcctaccttccctgcatctgtcatcacttatgaaacccaaacagagagatctagagcacaaacaatacaaagagaacaggagcctcaaaagaagaacaggactgacccaaacatctctccagaccagagttctggcttcactacacccactgctatgacacctcctgttctaaccacagccgaaacttcagtcaagcccagtgtctctgcattcactcattccccaccagaaaacacaactgggatttcaagcacaatcagttttcattcaagaactcttaatctgacagatgtgattgaagaactagcccaagcaagtactcagactttgaagagcacaattgcttctgaaacaactttgtccagcaaatcacaccagagtaccacaactaggaaagcaatcattagacactcaaccataccaccattcttgagcagcagtgctactctaatgccagttcccatctcccctccctttactcagagagcagttactgacaacgtggcgactcccatttccgggcttatgacaaatacagtggtcaagctgcacgaatcctcaaggcacaatgctaaaccacagcaattagtagcagaggttgcaacatcccccaaggttcacccaaatgccaagttcacaattggaaccactcacttcatctactctaatctgttacattctactcccatgccagcactaacaacagttaaatcacagaattctaaattaactccatctccctgggcagaaaaccaattttggcacaaaccatactcagaaattgctgaaaaaggcaaaaagccagaagtaagcatgttggctactacaggcctgtccgaggccaccactcttgtttcagattgggatggacagaagaacacaaagaagagtgactttgataagaaaccagttcaagaagcaacaacttccaaactccttccctttgactctttgtctaggtatatatttgaaaagcccaggatagttggaggaaaagctgcaagttttactattccagctaactcagatgcctttcttccctgtgaagctgttggaaatcccctgcccaccattcattggaccagagtcccatcaggtatgtcaggacttgatttatctaagaggaaacagaatagcagggtccaggttctccccaatggtaccctgtccatccagagggtggaaattcaggaccgcggacagtacttgtgttccgcatccaatctgtttggcacagaccaccttcatgtcaccttgtctgtggtttcctatcctcccaggatcctggagagacgtaccaaagagatcacagttcattccggaagcactgtggaactgaagtgcagagcagaaggtaggccaagccctacagttacctggattcttgcaaaccaaacagttgtctcagaatcatcccagggaagtaggcaggctgtggtgacggttgacggaacattggtcctccacaatctcagtatttatgaccgtggcttttacaaatgtgtggccagcaacccaggtggccaggattcactgctggttaaaatacaagtcattgcagcaccacctgttattctagagcaaaggaggcaagtcattgtaggcacttggggtgaaagtttaaaactgccctgtactgcaaaaggaactcctcagcccagcgtttactgggtcctctctgatggcactgaagtgaaaccattacagtttaccaattccaagttgttcttattttcaaatgggactttgtatataagaaacctagcctcttcagacaggggcacttatgaatgcattgctaccagttccactggttcggagcgaagagtagtaatgcttacaatggaagagcgagtgaccagccccaggatagaagctgcatcccagaaaaggactgaagtgaattttggggacaaattactactgaactgctcagccactggggagcccaaaccccaaataatgtggaggttaccatccaaggctgtggtcgaccagcagcatagggtgggcagctggatccacgtctaccctaatggatccctgtttattggatcagtaacagaaaaagacagtggtgtctacttgtgtgtggcaagaaacaaaatgggggatgatctgatactgatgcatgttagcctaagactgaaacctgccaaaattgaccacaagcagtattttagaaagcaagtgctccatgggaaagatttccaagtagattgcaaagcttccggctccccagtgccagagatatcttggagtttgcctgatggaaccatgatcaacaatgcaatgcaagccgatgacagtggccacaggactaggagatatacccttttcaacaatggaactttatacttcaacaaagttggggtagcggaggaaggagattatacttgctatgcccagaacaccctagggaaagatgaaatgaaggtccacttaacagttataacagctgctccccggataaggcagagtaacaaaaccaacaagagaatcaaagctggagacacagctgtccttgactgtgaggtcactggggatcccaaaccaaaaatattttggttgctgccttccaatgacatgatttccttctccattgataggtacacatttcatgccaatgggtctttgaccatcaacaaagtgaaactgctcgattctggagagtacgtatgtgtagcccgaaatcccagtggggatgacaccaaaatgtacaaactggatgtggtctctaaacctccattaatcaatggtctgtatacaaacagaactgttattaaagccacagctgtgagacattccaaaaaacactttgactgcagagctgaagggacaccatctcctgaagtcatgtggatcatgccagacaatattttcctcacagccccatactatggaagcagaatcacagtccataaaaatggaaccttggaaattaggaatgtgaggctttcagattcagccgactttatctgtgtggcccgaaatgaaggtggagagagcgtgttggtagtacagttagaagtactggaaatgctgagaagaccgacatttagaaatccatttaatgaaaaaatagttgcccagctgggaaagtccacagcattgaattgctctgttgatggtaacccaccacctgaaataatctggattttaccaaatggcacacgattttccaatggaccacaaagttatcagtatctgatagcaagcaatggttcttttatcatttctaaaacaactcgggaggatgcaggaaaatatcgctgtgcagctaggaataaagttggctatattgagaaattagtcatattagaaattggccagaagccagttattcttacctatgcaccagggacagtaaaaggcatcagtggagaatctctatcactgcattgtgtgtctgatggaatccctaagccaaatatcaaatggactatgccaagtggttatgtagtagacaggcctcaaattaatgggaaatacatattgcatgacaatggcaccttagtcattaaagaagcaacagcttatgacagaggaaactatatctgtaaggctcaaaatagtgttggtcatacactgattactgttccagtaatgattgtagcctaccctccccgaattacaaatcgtccacccaggagtattgtcaccaggacaggggcagcctttcagctccactgtgtggccttgggagttcccaagccagaaatcacatgggagatgcctgaccactcccttctctcaacggcaagtaaagagaggacacatggaagtgagcagcttcacttacaaggtaccctagtcattcagaatccccaaacctccgattctgggatatacaaatgcacagcaaagaacccacttggtagtgattatgcagcaacgtatattcaagtaatctgacatgaaataataaagtc

SEQ ID NO: 46 - protein, 2617 aa, Homo sapiens
MKVKGRGITCLLVSFAVICLVATPGGKACPRRCACYMPTEVHCTFRYLTSIPDSIPPNVERINLGYNSLVRLMETDFSGLTKLELLMLHSNGIHTIPDKTFSDLQALQVRLMVLKMSYNKVRKLQKDTFYGLRSLTRLHMDHNNIEFINPEVFYGLNFLRLVHLEGNQLTKLHPDTFVSLSYLQIFKISFIKFLYLSDNFLTSLPQEMVSYMPDLDSLYLHGNPWTCDCHLKWLSDWIQEKPGIYIVLPDVIKCKKDRSPSSAQQCPLCMNPRTSKGKPLAMVSAAAFQCAKPTIDSSLKSKSLTILEDSSSAFISPQGFMAPFGSLTLNMTDQSGNEANMVCSIQKPSRTSPIAFTEENDYIVLNTSFSTFLVCNIDYGHIQPVWQILALYSDSPLILERSHLLSETPQLYYKYKQVAPKPEDIFTNIEADLRADPSWLMQDQISLQLNRTATTFSTLQIQYSSDAQITLPRAEMRPVKHKWTMISRDNNTKLEHTVLVGGTVGLNCPGQGDPTPHVDWLLADGSKVRAPYVSEDGRILIDKSGKLELQMADSFDTGVYHCISSNYDDADILTYRITVVEPLVEAYQENGIHHTVFIGETLDLPCHSTGIPDASISWVIPGNNVLYQSSRDKKVLNNGTLRILQVTPKDQGYYRCVAANPSGVDFLIFQVSVKMKGQRPLEHDGETEGSGLDESNPIAHLKEPPGAQLRTSALMEAEVGKHTSSTSKRHNYRELTLQRRGDSTHRRFRENRRHFPPSARRIDPQHWAALLEKAKKNAMPDKRENTTVSPPPVVTQLPNIPGEEDDSSGMLALHEEFMVPATKALNLPARTVTADSRTISDSPMTNINYGTEFSPVVNSQILPPEEPTDFKLSTAIKTTAMSKNINPTMSSQIQGTTNQHSSTVFPLLLGATEFQDSDQMGRGREHFQSRPPITVRTMIKDVNVKMLSSTTNKLLLESVNTTNSHQTSVREVSEPRHNHFYSHTTQILSTSTFPSDPHTAAHSQFPIPRNSTVNIPLFRRFGRQRKIGGRGRIISPYRTPVLRRHRYSIFRSTTRGSSEKSTTAFSATVLNVTCLSCLPRERLTTATAALSFPSAAPITFPKADIARVPSEESTTLVQNPLLLLENKPSVEKTTPTIKYFRTEISQVTPTGAVMTYAPTSIPMEKTHKVNASYPRVSSTNEAKRDSVITSSLSGAITKPPMTIIAITRFSRRKIPWQQNFVNNHNPKGRLRNQHKVSLQKSTAVMLPKTSPALPQRQSLPSHHTTTKTHNPGSLPTKKELPFPPLNPMLPSIISKDSSTKSIISTQTAIPATTPTFPASVITYETQTERSRAQTIQREQEPQKKNRTDPNISPDQSSGFTTPTAMTPPVLTTAETSVKPSVSAFTHSPPENTTGISSTISFHSRTLNLTDVIEELAQASTQTLKSTIASETTLSSKSHQSTTTRKAIIRHSTIPPFLSSSATLMPVPISPPFTQRAVTDNVATPISGLMTNTVVKLHESSRHNAKPQQLVAEVATSPKVHPNAKFTIGTTHFIYSNLLHSTPMPALTTVKSQNSKLTPSPWAENQFWHKPYSEIAEKGKKPEVSMLATTGLSEATTLVSDWDGQKNTKKSDFDKKPVQEATTSKLLPFDSLSRYIFEKPRIVGGKAASFTIPANSDAFLPCEAVGNPLPTIHWTRVPSGMSGLDLSKRKQNSRVQVLPNGTLSIQRVEIQDRGQYLCSASNLFGTDHLHVTLSVVSYPPRILERRTKEITVHSGSTVELKCRAEGRPSPTVTWILANQTVVSESSQGSRQAVVTVDGTLVLHNLSIYDRGFYKCVASNPGGQDSLLVKIQVIAAPPVILEQRRQVIVGTWGESLKLPCTAKGTPQPSVYWVLSDGTEVKPLQFTNSKLFLFSNGTLYIRNLASSDRGTYECIATSSTGSERRVVMLTMEERVTSPRIEAASQKRTEVNFGDKLLLNCSATGEPKPQIMWRLPSKAVVDQQHRVGSWIHVYPNGSLFIGSVTEKDSGVYLCVARNKMGDDLILMHVSLRLKPAKIDHKQYFRKQVLHGKDFQVDCKASGSPVPEISWSLPDGTMINNAMQADDSGHRTRRYTLFNNGTLYFNKVGVAEEGDYTCYAQNTLGKDEMKVHLTVITAAPRIRQSNKTNKRIKAGDTAVLDCEVTGDPKPKIFWLLPSNDMISFSIDRYTFHANGSLTINKVKLLDSGEYVCVARNPSGDDTKMYKLDVVSKPPLINGLYTNRTVIKATAVRHSKKHFDCRAEGTPSPEVMWIMPDNIFLTAPYYGSRITVHKNGTLEIRNVRLSDSADFICVARNEGGESVLVVQLEVLEMLRRPTFRNPFNEKIVAQLGKSTALNCSVDGNPPPEIIWILPNGTRFSNGPQSYQYLIASNGSFIISKTTREDAGKYRCAARNKVGYIEKLVILEIGQKPVILTYAPGTVKGISGESLSLHCVSDGIPKPNIKWTMPSGYVVDRPQINGKYILHDNGTLVIKEATAYDRGNYICKAQNSVGHTLITVPVMIVAYPPRITNRPPRSIVTRTGAAFQLHCVALGVPKPEITWEMPDHSLLSTASKERTHGSEQLHLQGTLVIQNPQTSDSGIYKCTAKNPLGSDYAATYIQVI

SEQ ID NO: 47 - DNA, 771 bp, Homo sapiens
aagcttgcctgtcctcgccgctgtgcctgttatatgcctacggaggtacactgcacatttcggtacctgacttccatcccagacagcatcccgcccaatgtggaacgcatcaatttaggatacaacagcttggttagattgatggaaacagatttttctggcctgaccaaactggagttactcatgcttcacagcaatggcattcacacaatccctgacaagaccttctcagatttgcaggccttgcaggtcttaaaaatgagctataacaaagtccgaaaacttcagaaagatactttttatggcctcaggagcttggcacgattgcacatggaccacaacaatattgagtttataaacccagaggtttttgatgggctcaactttctccgcctggtgcacttggaaggaaatcagctcactaagctccacccagatacatttgtctctttgagctacctccagatatttaaaatctctttcattaagttcctatacttgtctgataacttcctgacctccctccctcaagagatggtctcctatatgcctgacctagacagcctttacctgcatggaaacccatggacctgtgattgccatttaaagtggttgtctgactggatacaggagaagccagatgtaataaaatgcaaaaaagatagaagtccctctagtgctcagcagtgtccactttgcatgaaccctaggacttctaaaggcaagccgttagctatggtctcagctgcagctttccagtgtgccctcgag

SEQ ID NO: 48 - protein, 257 aa, Homo sapiens
KLACPRRCACYMPTEVHCTFRYLTSIPDSIPPNVERINLGYNSLVRLMETDFSGLTKLELLMLHSNGIHTIPDKTFSDLQALQVLKMSYNKVRKLQKDTFYGLRSLARLHMDHNNIEFINPEVFDGLNFLRLVHLEGNQLTKLHPDTFVSLSYLQIFKISFIKFLYLSDNFLTSLPQEMVSYMPDLDSLYLHGNPWTCDCHLKWLSDWIQEKPDVIKCKKDRSPSSAQQCPLCMNPRTSKGKPLAMVSAAAFQCALE

SEQ ID NO: 49 - DNA, 771 bp, Homo sapiens
aagcttgcctgtcctcgccgctgtgcctgttatatgcctacggaggtacactgcacatttcggtacctgacttccatcccagacagcatcccgcccaatgtggaacgcatcaatttaggatacaacagcttggttagattaatggaaacagatttttctggcctgaccaaactggagttactcatgcttcacagcaatggcattcacacaatccctgacaagaccttctcagatttgcaggccttgcaggtcttaaaaatgagctataataaagtccgaaaacttcagaaagatactttttatggcctcaggagcttgacacgattgcacatggaccacaacaatattgagtttataaacccagaggttttttatgggctcaactttctccgcctggtgcacttggaaggaaatcagctcactaagctccacccagatacatttgtctctttgagctacctccagatatttaaaatctctttcattaagttcctatacttgtctgataacttcctgacctccctccctcaagagatggtctcctatatgcctgacctagacagcctttacctgcatggaaacccatggacctgtgattgccatttaaagtggttgtctgactggatacaggagaagccagatgtaataaaatgcaaaaaagatagaagtccctctagtgctcagcagtgtccactttgcatgaaccctaggacttctaaaggcaagccgttagctatggtctcagctgcagctttccagtgtgccctcgag

SEQ ID NO: 50 - protein, 257 aa, Homo sapiens
KLACPRRCACYMPTEVHCTFRYLTSIPDSIPPNVERINLGYNSLVRLMETDFSGLTKLELLMLHSNGIHTIPDKTFSDLQALQVLKMSYNKVRKLQKDTFYGLRSLTRLHMDHNNIEFINPEVFYGLNFLRLVHLEGNQLTKLHPDTFVSLSYLQIFKISFIKFLYLSDNFLTSLPQEMVSYMPDLDSLYLHGNPWTCDCHLKWLSDWIQEKPDVIKCKKDRSPSSAQQCPLCMNPRTSKGKPLAMVSAAAFQCALE

SEQ ID NO: 51 - DNA, 771 bp, Homo sapiens
aagcttgcctgtcctcgccgctgtgcctgttatatgcctacggaggtacactgcacatttcggtacctgacttccatcccagacagcatcccgcccaatgtggaacgcatcaatttaggatacaacagcttggttagattgatggaaacagatttttctggcctgaccaaactggagttactcatgcttcacagcaatggcattcacacaatccctgacaagaccttctcagatttgcaggccttgcaggtcttaaaaatgagctataacaaagtccgaaaacttcagaaagatactttttatggcctcaggagcttgacacgattgcacatggaccacaacaatattgagtttataaacccagaggtttttgatgggctcaactttctccgcctggtgcacttggaaggaaatcagctcactaagctccacccagatacatttgtctctttgagctacctccagatatttaaaatctctttcattaagttcctatacttgtctgataacttcctgacctccctccctcaagagatggtctcctatatgcctgacctagacagcctttacctgcatggaaacccatggacctgtgattgccatttaaagtggttgtctgactggatacaggagaagccagatgtaataaaatgcaaaaaagatagaagtccctctagtgctcagcagtgtccactttgcatgaaccctaggacttctaaaggcaagccgttagctatggtctcagctgcagctttccagtgtgccctcgag

SEQ ID NO: 52 - protein, 257 aa, Homo sapiens
KLACPRRCACYMPTEVHCTFRYLTSIPDSIPPNVERINLGYNSLVRLMETDFSGLTKLELLMLHSNGIHTIPDKTFSDLQALQVLKMSYNKVRKLQKDTFYGLRSLTRLHMDHNNIEFINPEVFDGLNFLRLVHLEGNQLTKLHPDTFVSLSYLQIFKISFIKFLYLSDNFLTSLPQEMVSYMPDLDSLYLHGNPWTCDCHLKWLSDWIQEKPDVIKCKKDRSPSSAQQCPLCMNPRTSKGKPLAMVSAAAFQCALE

SEQ ID NO: 53 - DNA, 771 bp, Homo sapiens
aagcttgcctgtcctcgccgctgtgcctgttatatgcctacggaggtacactgcacatttcggtacctgacttccatcccagacagcatcccgcccaatgtggaacgcatcaatttaggatacaacagcttggttagattgatggaaacagatttttctggcctgaccaaactggagttactcatgcttcacagcaatggcattcacacaatccctggcaagaccttctcagatttgcaggccttgcaggtcttaaaaatgagctataacaaagtccgaaaacttcagaaagatactttttatggcctcaggagcttgacacgattgcacatggaccacaacaatattgagtttataaacccagaggtttttgatgggctcaactttctccgcctggtgcacttggaaggaaatcagctcactaagctccacccagatacatttgtctctttgagctacctccagatatttaaaatctctttcattaagttcctatacttgtctgataacttcctgacctccctccctcaagagatggtctcctatatgcctgacctagacagcctttacctgcatggaaacccatggacctgtgattgccatttaaagtggttgtctgactggatacaggagaagccagatgtaataaaatgcaaaaaagatagaagtccctctagtgctcagcagtgtccactttgcatgaaccctaggacttctaaaggcaagccgttagctatggtctcagctgcagctttccagtgtgccctcgag

SEQ ID NO: 54 - protein, 257 aa, Homo sapiens
KLACPRRCACYMPTEVHCTFRYLTSIPDSIPPNVERINLGYNSLVRLMETDFSGLTKLELLMLHSNGIHTIPGKTFSDLQALQVLKMSYNKVRKLQKDTFYGLRSLTRLHMDHNNIEFINPEVFDGLNFLRLVHLEGNQLTKLHPDTFVSLSYLQIFKISFIKFLYLSDNFLTSLPQEMVSYMPDLDSLYLHGNPWTCDCHLKWLSDWIQEKPDVIKCKKDRSPSSAQQCPLCMNPRTSKGKPLAMVSAAAFQCALE

SEQ ID NO: 55 - DNA, 8270 bp, Homo sapiens
  misc_feature (746): Wherein n is a or t or c or g.
tcaggatgaaggtaaaaggcagaggaatcacctgcttgctggtctcctttgctgtgatctgcctggtcgccacccctgggggcaaggcctgtcctcgccgctgtgcctgttatatgcctacggaggtacactgcacatttcggtacctgacttccatcccagacagcatcccgcccaatgtggaacgcatcaatttagggtacaacagcttggttagattgatggaaacagatttttctggcctgaccaaactggagttactcatgcttcacagcaatggcattcacacaatccctgacaagaccttctcagatttgcaggccttgcaggtgagactgatggtcttaaaaatgagctataataaagtccgaaaacttcagaaagatactttttatggcctcaggagcttgacacgattgcacatggaccacaacaatattgagtttataaacccagaggttttttatgggctcaactttctccgcctggtgcacttggaaggaaatcagctcactaagctccacccagatacatttgtctctttgagctacctccagatatttaaaatctctttcattaagttcctatacttgtctgataacttcctgacctccctccctcaagagatggtctcctatatgcctgacctagacagcctttacctgcatggaaacccatggacctgtgattgccatttaaagtggttgtctgactggatacaggagaagccaggtatctatattgtnttaccagatgtaataaaatgcaaaaaagatagaagtccctctagtgctcagcagtgtccactttgcatgaaccctaggacttctaaaggcaagccgttagctatggtctcagctgcagctttccagtgtgccaagccaaccattgactcatccctgaaatcaaagagcctgactattctggaagacagtagttctgctttcatctctccccaaggtttcatggcaccctttggctccctcactttgaatatgacagatcagtctggaaatgaagctaacatggtctgcagtattcaaaagccctcaaggacatcacccattgcattcactgaagaaaatgactacatcgtgctaaatacttcattttcaacatttttggtgtgcaacatagattacggtcacattcagccagtgtggcaaattttggctttgtacagtgattctcctctgatactagaaaggagccacttgcttagtgaaacaccgcagctctattacaaatataaacaggtggctcctaagcctgaagacatttttaccaacatagaggcagatctcagagcagatccctcttggttaatgcaagaccaaatttccttgcagctgaacagaactgccaccacattcagtacattacagatccagtactccagtgatgctcaaatcactttaccaagagcagagatgaggccagtgaaacacaaatggactatgatttcaagggataacaatactaagctggaacatactgtcttggtaggtggaaccgttggcctgaactgcccaggccaaggagaccccaccccacacgtggattggcttctagctgatggaagtaaagtgagagccccttatgtcagtgaggatggacggatcctaatagacaaaagtggaaaattggaactccagatggctgatagttttgacacaggcgtatatcactgtataagcagcaattatgatgatgcagatattctcacctataggataactgtggtagaacctttggtcgaagcctatcaggaaaatgggattcatcacacagttttcattggtgaaacacttgatcttccatgccattctactggtatcccagatgcctctattagctgggttattccaggaaacaatgtgctctatcagtcatcaagagacaagaaagttctaaacaatggcacattaagaatattacaggtcaccccgaaagaccaaggttattatcgctgtgtggcagccaacccatcaggggttgattttttgattttccaagtttcagtcaagatgaaaggacaaaggcccttggagcatgatggagaaacagagggatctggacttgatgagtccaatcctattgctcatcttaaggagccaccaggtgcacaactccgtacatctgctctgatggaggctgaggttggaaaacacacctcaagcacaagtaagaggcacaactatcgggaattaacactccagcgacgtggagattcaacacatcgacgttttagggagaataggaggcatttccctccctctgctaggagaattgacccacaacattgggcggcactgttggagaaagctaaaaagaatgctatgccagacaagcgagaaaataccacagtgagcccacccccagtggtcacccaactcccaaacatacctggtgaagaagacgattcctcaggcatgctcgctctacatgaggaatttatggtcccggccactaaagctttgaaccttccagcaaggacagtgactgctgactccagaacaatatctgatagtcctatgacaaacataaattatggcacagaattctctcctgttgtgaattcacaaatactaccacctgaagaacccacagatttcaaactgtctactgctattaaaactacagccatgtcaaagaatataaacccaaccatgtcaagccaaatacaaggcacaaccaatcaacattcatccactgtctttccactgctacttggagcaactgaatttcaggactctgaccagatgggaagaggaagagagcatttccaaagtagacccccaataacagtaaggactatgatcaaagatgtcaatgtcaaaatgcttagtagcaccaccaacaaactattattagagtcagtaaataccacaaatagtcatcagacatctgtaagagaagtgagtgaacccaggcacaatcacttctattctcacactactcaaatacttagcacctccacgttcccttcagatccacacacagctgctcattctcagtttccgatccctagaaatagtacagttaacatcccgctgttcagacgctttgggaggcagaggaaaattggcggaagggggcggattatcagcccatatagaactccagttctgcgacggcatagatacagcattttcaggtcaacaaccagaggttcttctgaaaaaagcactactgcattctcagccacagtgctcaatgtgacatgtctgtcctgtcttcccagggagaggctcaccactgccacagcagcattgtcttttccaagtgctgctcccatcaccttccccaaagctgacattgctagagtcccatcagaagagtctacaactctagtccagaatccactattactacttgagaacaaacccagtgtagagaaaacaacacccacaataaaatatttcaggactgaaatttcccaagtgactccaactggtgcagtcatgacatatgctccaacatccatacccatggaaaaaactcacaaagtaaacgccagttacccacgtgtgtctagcaccaatgaagctaaaagagattcagtgattacatcgtcactttcaggtgctatcaccaagccaccaatgactattatagccattacaaggttttcaagaaggaaaattccctggcaacagaactttgtaaataaccataacccaaaaggcagattaaggaatcaacataaagttagtttacaaaaaagcacagctgtgatgcttcctaaaacatctcctgctttaccacagagacaaagtctcccctcgcaccacactacgaccaaaacacacaatcctggaagtcttccaacaaagaaggagcttcccttcccaccccttaaccctatgcttcctagtattataagcaaagactcaagtacaaaaagcatcatatcaacgcaaacagcaataccagcaacaactcctaccttccctgcatctgtcatcacttatgaaacccaaacagagagatctagagcacaaacaatacaaagagaacaggagcctcaaaagaagaacaggactgacccaaacatctctccagaccagagttctggcttcactacacccactgctatgacacctcctgttctaaccacagccgaaacttcagtcaagcccagtgtctctgcattcactcattccccaccagaaaacacaactgggatttcaagcacaatcagttttcattcaagaactcttaatctgacagatgtgattgaagaactagcccaagcaagtactcagactttgaagagcacaattgcttctgaaacaactttgtccagcaaatcacaccagagtaccacaactaggaaagcaatcattagacactcaaccataccaccattcttgagcagcagtgctactctaatgccagttcccatctcccctccctttactcagagagcagttactgacaacgtggcgactcccatttccgggcttatgacaaatacagtggtcaagctgcacgaatcctcaaggcacaatgctaaaccacagcaattagtagcagaggttgcaacatcccccaaggttcacccaaatgccaagttcacaattggaaccactcacttcatctactctaatctgttacattctactcccatgccagcactaacaacagttaaatcacagaattctaaattaactccatctccctgggcagaaaaccaattttggcacaaaccatactcagaaattgctgaaaaaggcaaaaagccagaagtaagcatgttggctactacaggcctgtccgaggccaccactcttgtttcagattgggatggacagaagaacacaaagaagagtgactttgataagaaaccagttcaagaagcaacaacttccaaactccttccctttgactctttgtctaggtatatatttgaaaagcccaggatagttggaggaaaagctgcaagttttactattccagctaactcagatgcctttcttccctgtgaagctgttggaaatcccctgcccaccattcattggaccagagtcccatcaggtatgtcaggacttgatttatctaagaggaaacagaatagcagggtccaggttctccccaatggtaccctgtccatccagagggtggaaattcaggaccgcggacagtacttgtgttccgcatccaatctgtttggcacagaccaccttcatgtcaccttgtctgtggtttcctatcctcccaggatcctggagagacgtaccaaagagatcacagttcattccggaagcactgtggaactgaagtgcagagcagaaggtaggccaagccctacagttacctggattcttgcaaaccaaacagttgtctcagaatcatcccagggaagtaggcaggctgtggtgacggttgacggaacattggtcctccacaatctcagtatttatgaccgtggcttttacaaatgtgtggccagcaacccaggtggccaggattcactgctggttaaaatacaagtcattgcagcaccacctgttattctagagcaaaggaggcaagtcattgtaggcacttggggtgaaagtttaaaactgccctgtactgcaaaaggaactcctcagcccagcgtttactgggtcctctctgatggcactgaagtgaaaccattacagtttaccaattccaagttgttcttattttcaaatgggactttgtatataagaaacctagcctcttcagacaggggcacttatgaatgcattgctaccagttccactggttcggagcgaagagtagtaatgcttacaatggaagagcgagtgaccagccccaggatagaagctgcatcccagaaaaggactgaagtgaattttggggacaaattactactgaactgctcagccactggggagcccaaaccccaaataatgtggaggttaccatccaaggctgtggtcgaccagcagcatagagtgggcagctggatccacgtctaccctaatggatccctgtttattggatcagtaacagaaaaagacagtggtgtctacttgtgtgtggcaagaaacaaaatgggggatgatctgatactgatgcatgttagcctagaactgaaacctgccaaaattgaccacaagcagtattttagaaagcaagtgctccatgggaaagatttccaagtagattgcaaagcttccggctccccagtgccagagatatcttggagtttgcctgatggaaccatgatcaacaatgcaatgcaagccgatgacagtggccacaggactaggagatatacccttttcaacaatggaactttatacttcaacaaagttggggtagcggaggaaggagattatacttgctatgcccagaacaccctagggaaagatgaaatgaaggtccacttaacagttataacagctgctccccggataaggcagagtaacaaaaccaacaagagaatcaaagctggagacacagctgtccttgactgtgaggtcattcatgccaatgggtctttgaccatcaacaaagtgaaactgctcgattctggagagtacgtatgtgtagcccgaaatcccagtggggatgacaccaaaatgtacaaactggatgtggtctctaaacctccattaatcaatggtctgtatacaaatagaactgttattaaagccacagctgtgagacattccaaaaaacactttgactgcagagctgaagggacaccatctcctgaagtcatgtggatcatgccagacaatattttcctcacagccccatactatggaagcagaatcacagtccataaaaatggaaccttggaaattaggaatgtgaggctttcagattcagccgactttatctgtgtggcccgaaatgaaggtggagagagcgtgttggtagtacagttagaagtactggaaatgctgagaagaccgacatttagaaatccatttaatgaaaaaatagttgcccagctgggaaagtccacagcattgaattgctctgttgatggtaacccaccacctgaaataatctggattttaccaaatggcacacgattttccaatggaccacaaagttatcagtatctgatagcaagcaatggttcttttatcatttctaaaacaactcgggaggatgcaggaaaatatcgctgtgcagctaggaataaagttggctatattgagaaattagtcatattagaaattggccagaagccagttattcttacctatgcaccagggacagtaaaaggcatcagtggagaatctctatcactgcattgtgtgtctgatggaatccctaagccaaatatcaaatggactatgccaagtggttatgtagtagacaggcctcaaattaatgggaaatacatattgcatgacaatggcaccttagtcattaaagaagcaacagcttatgacagaggaaactatatctgtaaggctcaaaatagtgttggtcatacactgattactgttccagtaatgattgtagcctaccctccccgaattacaaatcgtccacccaggagtattgtcaccaggacaggggcagcctttcagctccactgtgtggccttgggagttcccaagccagaaatcacgtgggagatgcctgaccactcccttctctcaacggcaagtaaagagaggacacatggaagtgagcagcttcacttacaaggtaccctagtcattcagaatccccaaacctccgattctgggatatacaaatgcacagcaaagaacccacttggtagtgattatgcagcaacgtatattcaagtaatctgacatgaaataataaagtcaacaacatctgggcagaatttattttttggaagaagtttaatcaaaggcagccataggcatgtaaatgaatttgaatacatttacagtattaaatttacaatgaacatgcaaaataaaaggacttgtaaataaatgcattatgaactgatgatactgatttatttaatggatctcaaaacaaacttttaacttaaggcacttttattttgccaacaaataacaataaacaaacattgaaacggttcactataaaataacaaatggctaatgtacctgaatttttcagtaaaaaaatgaacttctaataccagttgcctagtgtccacctcctatcaatgttacaagcatggcactcagaacagagacaatggaaaatattaaatctgcaatctttatgatgtaaatttaccatcctgatgtataaatattttgtggtttataaatttttttgctaaaacctacagaaaaaaa

SEQ ID NO: 56 - protein, 2591 aa, Homo sapiens
MKVKGRGITCLLVSFAVICLVATPGGKACPRRCACYMPTEVHCTFRYLTSIPDSIPPNVERINLGYNSLVRLMETDFSGLTKLELLMLHSNGIHTIPDKTFSDLQALQVRLMVLKMSYNKVRKLQKDTFYGLRSLTRLHMDHNNIEFINPEVFYGLNFLRLVHLEGNQLTKLHPDTFVSLSYLQIFKISFIKFLYLSDNFLTSLPQEMVSYMPDLDSLYLHGNPWTCDCHLKWLSDWIQEKPGIYIVLPDVIKCKKDRSPSSAQQCPLCMNPRTSKGKPLAMVSAAAFQCAKPTIDSSLKSKSLTILEDSSSAFISPQGFMAPFGSLTLNMTDQSGNEANMVCSIQKPSRTSPIAFTEENDYIVLNTSFSTFLVCNIDYGHIQPVWQILALYSDSPLILERSHLLSETPQLYYKYKQVAPKPEDIFTNIEADLRADPSWLMQDQISLQLNRTATTFSTLQIQYSSDAQITLPRAEMRPVKHKWTMISRDNNTKLEHTVLVGGTVGLNCPGQGDPTPHVDWLLADGSKVRAPYVSEDGRILIDKSGKLELQMADSFDTGVYHCISSNYDDADILTYRITVVEPLVEAYQENGIHHTVFIGETLDLPCHSTGIPDASISWVIPGNNVLYQSSRDKKVLNNGTLRILQVTPKDQGYYRCVAANPSGVDFLIFQVSVKMKGQRPLEHDGETEGSGLDESNPIAHLKEPPGAQLRTSALMEAEVGKHTSSTSKRHNYRELTLQRRGDSTHRRFRENRRHFPPSARRIDPQHWAALLEKAKKNAMPDKRENTTVSPPPVVTQLPNIPGEEDDSSGMLALHEEFMVPATKALNLPARTVTADSRTISDSPMTNINYGTEFSPVVNSQILPPEEPTDFKLSTAIKTTAMSKNINPTMSSQIQGTTNQHSSTVFPLLLGATEFQDSDQMGRGREHFQSRPPITVRTMIKDVNVKMLSSTTNKLLLESVNTTNSHQTSVREVSEPRHNHFYSHTTQILSTSTFPSDPHTAAHSQFPIPRNSTVNIPLFRRFGRQRKIGGRGRIISPYRTPVLRRHRYSIFRSTTRGSSEKSTTAFSATVLNVTCLSCLPRERLTTATAALSFPSAAPITFPKADIARVPSEESTTLVQNPLLLLENKPSVEKTTPTIKYFRTEISQVTPTGAVMTYAPTSIPMEKTHKVNASYPRVSSTNEAKRDSVITSSLSGAITKPPMTIIAITRFSRRKIPWQQNFVNNHNPKGRLRNQHKVSLQKSTAVMLPKTSPALPQRQSLPSHHTTTKTHNPGSLPTKKELPFPPLNPMLPSIISKDSSTKSIISTQTAIPATTPTFPASVITYETQTERSRAQTIQREQEPQKKNRTDPNISPDQSSGFTTPTAMTPPVLTTAETSVKPSVSAFTHSPPENTTGISSTISFHSRTLNLTDVIEELAQASTQTLKSTIASETTLSSKSHQSTTTRKAIIRHSTIPPFLSSSATLMPVPISPPFTQRAVTDNVATPISGLMTNTVVKLHESSRHNAKPQQLVAEVATSPKVHPNAKFTIGTTHFIYSNLLHSTPMPALTTVKSQNSKLTPSPWAENQFWHKPYSEIAEKGKKPEVSMLATTGLSEATTLVSDWDGQKNTKKSDFDKKPVQEATTSKLLPFDSLSRYIFEKPRIVGGKAASFTIPANSDAFLPCEAVGNPLPTIHWTRVPSGMSGLDLSKRKQNSRVQVLPNGTLSIQRVEIQDRGQYLCSASNLFGTDHLHVTLSVVSYPPRILERRTKEITVHSGSTVELKCRAEGRPSPTVTWILANQTVVSESSQGSRQAVVTVDGTLVLHNLSIYDRGFYKCVASNPGGQDSLLVKIQVIAAPPVILEQRRQVIVGTWGESLKLPCTAKGTPQPSVYWVLSDGTEVKPLQFTNSKLFLFSNGTLYIRNLASSDRGTYECIATSSTGSERRVVMLTMEERVTSPRIEAASQKRTEVNFGDKLLLNCSATGEPKPQIMWRLPSKAVVDQQHRVGSWIHVYPNGSLFIGSVTEKDSGVYLCVARNKMGDDLILMHVSLELKPAKIDHKQYFRKQVLHGKDFQVDCKASGSPVPEISWSLPDGTMINNAMQADDSGHRTRRYTLFNNGTLYFNKVGVAEEGDYTCYAQNTLGKDEMKVHLTVITAAPRIRQSNKTNKRIKAGDTAVLDCEVIHANGSLTINKVKLLDSGEYVCVARNPSGDDTKMYKLDVVSKPPLINGLYTNRTVIKATAVRHSKKHFDCRAEGTPSPEVMWIMPDNIFLTAPYYGSRITVHKNGTLEIRNVRLSDSADFICVARNEGGESVLVVQLEVLEMLRRPTFRNPFNEKIVAQLGKSTALNCSVDGNPPPEIIWILPNGTRFSNGPQSYQYLIASNGSFIISKTTREDAGKYRCAARNKVGYIEKLVILEIGQKPVILTYAPGTVKGISGESLSLHCVSDGIPKPNIKWTMPSGYVVDRPQINGKYILHDNGTLVIKEATAYDRGNYICKAQNSVGHTLITVPVMIVAYPPRITNRPPRSIVTRTGAAFQLHCVALGVPKPEITWEMPDHSLLSTASKERTHGSEQLHLQGTLVIQNPQTSDSGIYKCTAKNPLGSDYAATYIQVI

SEQ ID NO: 57 - DNA, 840 bp, Homo sapiens
ggcctccgggatttgctacctttttggctccctgctcgtcgaactgctcttctcacgggctgtcgccttcaatctggacgtgatgggtgccttgcgcaaggagggcgagccaggcagcctcttcggcttctctgtggccctgcaccggcagttgcagccccgaccccagagctggctgctggtgggtgctccccaggccctggctcttcctgggcagcaggcgaatcgcactggaggcctcttcgcttgcccgttgagcctggaggagactgactgctacagagtggacatcgaccagggagctgatatgcaaaaggaaagcaaggagaaccagtggttgggagtcagtgttcggagccaggggcctgggggcaagattgttgactgcgcccggggcacggccaactgtgtggtgttcagctgcccactctacagctttgaccgcgcggctgtgctgcatgtctggggccgtctctggaacagcacctttctggaggagtactcagctgtgaagtccctggaagtgattgtccgggccaacatcacagtgaagtcctccataaagaacttgatgctccgagatgcctccacagtgatcccagtgatggtatacttggaccccatggctgtggtggcagaaggagtgccctggtgggtcatcctcctggctgtactggctgggctgctggtgctagcactgctggtgctgctcctgtggaagtgtggcttcttccatcggagcagccagagctcatcttttcccaccaactatcaccgggcctgtctggctgtgcagccttcagccatggaagttgggggtccagggactgtggggtaact

SEQ ID NO: 58 - protein, 278 aa, Homo sapiens
ASGICYLFGSLLVELLFSRAVAFNLDVMGALRKEGEPGSLFGFSVALHRQLQPRPQSWLLVGAPQALALPGQQANRTGGLFACPLSLEETDCYRVDIDQGADMQKESKENQWLGVSVRSQGPGGKIVDCARGTANCVVFSCPLYSFDRAAVLHVWGRLWNSTFLEEYSAVKSLEVIVRANITVKSSIKNLMLRDASTVIPVMVYLDPMAVVAEGVPWWVILLAVLAGLLVLALLVLLLWKCGFFHRSSQSSSFPTNYHRACLAVQPSAMEVGGPGTVG

SEQ ID NO: 59 - DNA, 708 bp, Homo sapiens
ctcgagcataccagtctttgaggcaatccaatctcgatacttagttactctggtgtagactccaggttttttgggaagtgcacatgattgtccccaacttactatacctacaatgtaccagatgtcatgattatcataaaccagaggtccaccagaatctcccttacatgcatctatttttccttccatgaatccagcacataacattcctggagttatcaggccatcatacacatcctttctgttacacacatcagtgcttatggtttccactctggcttgccgaagtgtattttgtataggtccatcatctacaatggatccaaatcctgtgacgaacacacttgttttaggtggcaactttatagatgagtctgggaggtaaactctctggactatatttgaaaactcaactccagtagagagctgaaccaaagcaatgtcattttcatttgtttctctatggtaattctcatgaagaataattttcctcacatttcgtttcactgcgggtggtgttatagttgcaccaaaagtagcaatccattgagttgggtctttatttttccaaaagcagtgagctgctgtgagcagccatgtgttactgatgaggctggctccacactgatggcctgaccctatgagctggaggctggcctgccatggccattccccttccatagctgtttcccttccttggacagatct

SEQ ID NO: 60 - DNA, 771 bp, Homo sapiens
ctcgagggcacactggaaagctgcagctgagaccatagctaacggcttgcctttagaagtcctagggttcatgcaaagtggacactgctgagcactagagggacttctatcttttttgcattttattacatctggcttctcctgtatccagtcagacaaccactttaaatggcaatcacaggtccatgggtttccatgcaggtaaaggctgtctaggtcaggcatataggagaccatctcttgagggagggaggtcaggaagttatcagacaagtataggaacttaatgaaagagattttaaatatctggaggtagctcaaagagacaaatgtatctgggtggagcttagtgagctgatttccttccaagtgcaccaggcggagaaagttgagcccatcaaaaacctctgggtttataaactcaatattgttgtggtccatgtgcaatcgtgtcaagctcctgaggccataaaaagtatctttctgaagttttcggactttgttatagctcatttttaagacctgcaaggcctgcaaatctgagaaggtcttgtcagggattgtgtgaatgccattgctgtgaagcatgagtaactccagtttggtcaggccagaaaaatctgtttccatcaatctaaccaagctgttgtatcctaaattgatgcgttccacattgggcgggatgctgtctgggatggaagtcaggtaccgaaatgtgcagtgtacctccgtaggcatataacaggcacagcggcgaggacaggcaagctt

SEQ ID NO: 61 - protein, 246 aa, Homo sapiens
MMSRIFRHSSVGGRFIKSHVIKLSPDEQGVDILIVLIFRYPSTDSAEQIKKKIEKALYQSLKTKQLSLTINKPSFRLTRCGIRMTSSNMPLPASSSTQRIVQGRETAMEGEWPWQASLQLIGSGHQCGASLISNTWLLTAAHCFWKNKDPTQWIATFGATITPPAVKRNVRKIILHENYHRETNENDIALVQLSTGVEFSNIVQRVCLPDSSIKLPPKTSVFVTGFGSIVDDGEQFQPNFLSTRMS

SEQ ID NO: 62 - protein, 418 aa, Homo sapiens
MYRPARVTSTSRFLNPYVVCFIVVAGVVILAVTIALLVYFLAFDQKSYFYRSSFQLLNVEYNSQLNSPATQEYRTLSGRIESLITKTFKESNLRNQFIRAHVAKLRQDGSGVRADVVMKFQFTRNNNGASMKSRIESVLRQMLNNSGNLEINPSTEITSLTDQAAANWLINECGAGPDLITLSEQRILGGTEAEEGSWPWQVSLRLNNAHHCGGSLINNMWILTAAHCFRSNSNPRDWIATSGISTTFPKLRMRVRNILIHNNYKSATHENDIALVRLENSVTFTKDIHSVCLPAATQNIPPGSTAYVTGWGAQEYAGHTVPELRQGQVRIISNDVCNAPHSYNGAILSGMLCAGVPQGGVDACQGDSGGPLVQEDSRRLWFIVGIVSWGDQCGLPDKPGVYTRVTAYLDWIRQQTGI

SEQ ID NO: 63 - protein, 345 aa, Homo sapiens
MSQRLESMVKNAFYKSPLREEFVKSQVIKFSQQKHGVLAHMLLICRFHSTEDPETVDKIVQLVLHEKLQDAVGPPKVDPQSVKIKKINKTETDSYLNHCCGTRRSKTLGQSLRIVGGTEVEEGEWPWQASLQWDGSHRCGATLINATWLVSAAHCFTTYKNPARWTASFGVTIKPSKMKRGLRRIIVHEKYKHPSHDYDISLAELSSPVPYTNAVHRVCLPDASYEFQPGDVMFVTGFGALKNDGYSQNHLRQAQVTLIDATTCNEPQAYNDAITPRMLCAGSLEGKTDACQGDSGGPLVSSDARDIWYLAGIVSWGDECAKPNKPGVYTRVTALRDWITSKTGI

SEQ ID NO: 64 - protein, 422 aa, Homo sapiens
MYRPDVVRARKRVCWEPWVIGLVIFISLIVLAVCIGLTVHYVRYNQKKTYNYYSTLSFTTDKLYAEFGREASNNFTEMSQRLESMVKNAFYKSPLREEFVKSQVIKFSQQKHGVLAHMLLICRFHSTEDPETVDKIVQLVLHEKLQDAVGPPKVDPHSVKIKKINKTETDSYLNHCCGTRRSKTLGQSLRIVGGTEVEEGEWPWQASLQWDGSHRCGATLINATWLVSAAHCFTTYKNPARWTASFGVTIKPSKMKRGLRRIIVHEKYKHPSHDYDISLAELSSPVPYTNAVHRVCLPDASYEFQPGDVMFVTGFGALKNDGYSQNHLRQAQVTLIDATTCNEPQAYNDAITPRMLCAGSLEGKTDACQGDSGGPLVSSDARDIWYLAGIVSWGDECAKPNKPGVYTRVTALRDWITSKTGI

SEQ ID NO: 65 - protein, 406 aa, Homo sapiens
MYRTVGFGTRSRNLKPWMIAVLIVLSLTVVAVTIGLLVHFLVFDQKKEYYHGSFKILDPQINNNFGQSNTYQLKDLRETTENLWATQPSPIVVAPRVAGSGGLPGMGSKDCPPSPHALPAVAMVKNGNVGPGSGAGEAPGLGAGPAWSPMSSSTGELTVQASCGKRVVPLNVNRIASGVIAPKAAWPWQASLQYDNIHQCGATLISNTWLVTAAHCFQKYKNPHQWTVSFGTKINPPLMKRNVRRFIIHEKYRSAAREYDIAVVQVSSRVTFSDDIRQICLPEASASFQPNLTVHITGFGALYYGGESQNDLREARVKIISDDVCKQPQVYGNDIKPGMFCAGYMEGIYDACRGDSGGPLVTRDLKDTWYLIGIVSWGDNCGQKDKPGVYTQVTYYRNWIASKTGI

SEQ ID NO: 66 - protein, 230 aa, Artificial Sequence
  Description of Artificial Sequence: Trypsin-like serine protease Consensus Sequence
RIVGGSEANIGSFPWQVSLQYRGGRHFCGGSLISPRWVLTAAHCVYGSAPSSIRVRLGSHDLSSGEETQTVKVSKVIVHPNYNPSTYDNDIALLKLSEPVTLSDTVRPICLPSSGYNVPAGTTCTVSGWGRTSESSGSLPDTLQEVNVPIVSNATCRRAYSGGPAITDNMLCAGGLEGGKDACQGDSGGPLVCNDPRWVLVGIVSWGSYGCARPNKPGVYTRVSSYLDWI

SEQ ID NO: 67 - protein, 217 aa, Artificial Sequence
  Description of Artificial Sequence: Trypsin Consensus Sequence
IVGGREAQAGSFPWQVSLQVSSGHFCGGSLISENWVLTAAHCVSGASSVRVVLGEHNLGTTEGTEQKFDVKKIIVHPNYNPDTNDIALLKLKSPVTLGDTVRPICLPSASSDLPVGTTCSVSGWGRTKNLGTSDTLQEVVVPIVSRETCRSAYGGTVTDTMICAGALGGKDACQGDSGGPLVCSDGELVGIVSWGYGCAVGNYPGVYTRVSRYLDWI

SEQ ID NO: 68 - protein, 495 aa, Homo sapiens
  VARIANT (216)..(226): Wherein Xaa is any amino acid.
MDSISTAILLLLLALVCLLLTLSSRDKGKLPPGPRPLSILGNLLLLCSQDMLTSLTKLSKEYGSMYTVHLGPRRVVVLSGYQAVKEALVDQGEEFSGRGDYPAFFNFTKGNGIAFSSGDRWKVLRQFSIQILRNFGMGKRSIEERILEEGSFLLAELRKTEGEPFDPTFVLSRSVSNIICSVLFGSRFDYDDERLLTIIRLINDNFQIMSSPWGEXXXXXXXXXXXLLDWVPGPHQRIFQNFKCLRDLIAHSVHDHQASLDPRSPRDFIQCFLTKMAEEKEDPLSHFHMDTLLMTTHNLLFGGTKTVSTTLHHAFLALMKYPKVQARVQEEIDLVVGRARLPALKDRAAMPYTDAVIHEVQRFADIIPMNLPHRVTRDTAFRGFLIPKGTDVITLLNTVHYDPSQFLTPQEFNPEHFLDANQSFKKSPAFMPFSAGRRLCLGESLARMELFLYLTAILQSFSLQPLGAPEDIDLTPLSSGLGNLPRPFQLCLRPR

SEQ ID NO: 69 - protein, 491 aa, Homo sapiens [sequence omitted]

SEQ ID NO: 70 - protein, 491 aa, Capra hircus
MDSISTAILLLILALICLLLTTSSKGKGRLPPGPRALPFLGNLLQLRSQDMLTSLTKLSKEFGAVYTVYLGPRRVVVLSGYQAVKEALVDQAEEFSGRGDYPAFFNFTKGNGIAFSNGDRWKALRKYSLQILRNFGMGKRTIEERILEEGHFLLEELRKTQGKPFDPTFVVSRSVSNIICSVIFGSRFDYDDDRLLTIIHLINENFQIMSSPWGEMYNIFPNLLDWVPGPHRRLFKNYGRMKNLIARSVREHQASLDPNSPRDFIDCFLTKMAQEKQDPLSHFFMDTLLMTTHNLLFGGTETVGTTLRHAFRLLMKYPEVQVRVQEEIDRVVGRERLPTVEDRAEMPYTDAVIHEVQRFADIIPMSLPHRVTRDTNFRGFTIPRGTDVITLLNTVHYDPSQFLKPKEFNPEHFLDANMSFKKSPAFMPFSAGRRLCLGEALARMELFLYLTAILQSFSLQPLGAPEDIDLTPLSSGLGNVPRPYQLCVRAR

SEQ ID NO: 71 - protein, 491 aa, Rattus norvegicus
MDGVSTAILLLLLAVISLSLTFTSWGKGQLPPGPKPLPILGNLLQLRSQDLLTSLTKLSKDYGSVFTVYLGPRRVIVLSGYQTVKEALVDKGEEFSGRGSYPIFFNFTKGNGIAFSDGERWKILRRFSVQILRNFGMGKRSIEERILEEGSFLLDVLRKTEGKPFDPVFILSRSVSNIICSVIFGSRFDYDDERLLTIIHFINDNFQIMSSPWGEMYNIFPSLLDWVPGPHRRVFRNFGGMKDLIARSVREHQDSLDPNSPRDFIDCFLTKMVQEKQDPLSHFNMDTLLMTTHNLLFGGTETVGTTLRHAFLILMKYPKVQARVQEEIDCVVGRSRMPTLEDRASMPYTDAVIHEVQRFADVIPMNLPHRVIRDTPFRGFLIPKGTDVITLLNTVHYDSDQFKTPQEFNPEHFLDANQSFKKSPAFMPFSAGRRLCLGEPLARMELFIYLTSILQNFTLHPLVEPEDIDLTPLSSGLGNLPRPFQLCMRIR

SEQ ID NO: 72 - protein, 491 aa, Mus musculus
MDGVSTAILLLLLAVISLSLTFSSRGKGQLPPGPKPLPILGNLLQLRSQDLLTSLTKLSKEYGSVFTVYLGSRPVIVLSGYQTVKEALVDKGEEFSGRGAYPVFFNFTRGNGIAFSDGERWKILRRFSVQILRNFGMGKRSIEERILEEGSFLLEVLRKMEGKPFDPVFILSRSVSNIICSVVFGSRFDYDDERLLTIIHFINDNFKIMSSPWGEMYNIFPSVLDWIPGPHKRLFRNFGGMKDLIARSVREHQDSLDPNSPRDFIDCFLTKMAQEKQDPLSHFNMDTLLMTTHNLLFGGTETVGTTLRHAFLILMKYPKVQARVQEEIDRVVGRSRMPTLEDRTSMPYTDAVIHEVQRFADVIPMNLPHRVTRDTPFRGFLIPKGTDVITLLNTVHYDSDQFKTPQEFNPEHFLDDNHSFKKSPAFMPFSAGRRLCLGEPLARMELFIYFTSILQNFTLQPLVDPEDIDLTPLSSGLGNLPRPFQLCMHIR

SEQ ID NO: 73 - protein, 445 aa, Artificial Sequence
  Description of Artificial Sequence: Cytochrtome P450 Consensus Sequence
PPGPPPLPLIGNLLQLGRGPIHSLTELRKKYGPVFTLYLGPRPVVVVTGPEAVKEVLIDKGEEFAGRGDFPVFPWLGYGILFSNGPRWRQLRRLLTLRFFGMGKRSKLEERIQEEARDLVERLRKEQGSPIDITELLAPAPLNVICSLLFGVRFDYEDPEFLKLIDKLNELFFLVSPWGQLLDFFRYLPGSHRKAFKAAKDLKDYLDKLIEERRETLEPGDPRDFLDSLLIEAKREGGSELTDEELKATVLDLLFAGTDTTSSTLSWALYLLAKHPEVQAKLREEIDEVIGRDRSPTYDDRANMPYLDAVIKETLRLHPVVPLLLPRVATEDTEIDGYLIPKGTLVIVNLYSLHRDPKVFPNPEEFDPERFLDENGKFKKSYAFLPFGAGPRNCLGERLARMELFLFLATLLQRFELELVPPGDIPLTPKPLGLPSKPPLYQLRA

SEQ ID NO: 74 - protein, 267 aa, Homo sapiens
MKAAVLTLAVLFLTGSQARHFWQQDEPPQSPWDRVKDLATVYVDVLKDSGRDYVSQFEGSALGKQLNLKLLDNWDSVTSTFSKLREQLGPVTQEFWDNLEKETEGLRQEMSKDLEEVKAKVQPYLDDFQKKWQEEMELYRQKVDPLRAELQEGARQKLHELQEKLSPLGEEMRDRARAHVDALRTHLAPYSDELRQRLAARLEALKENGGARLAEYHAKATEHLSTLSEKAKPALEDLRQGLLPVLESFKVSFLSALEEYTKKLNTQ

SEQ ID NO: 75 - protein, 267 aa, Homo sapiens
MKAAVLTLAVLFLTGSQARHFWQQDEPPQSPWDRVKDLATVYVDVLKDSGRDYVSQFEGSALGKQLNLKLLDNWDSVTSTFSKLREQLGPVTQEFWDNLEKETEGLRQEMSKDLEEVKAKVQPYLDDFQKKWQEEMELYRQKVEPLRAELQEGARQKLHELQEKLSPLGEEMRDRARAHVDALRTHLAPYSDELRQRLAARLEALKENGGARLAEYHAKATEHLSTLSEKAKPALEDLRQGLLPVLESFKVSFLSALEEYTKKLNTQ

SEQ ID NO: 76 - protein, 249 aa, Homo sapiens
RHFWQQDEPPQSPWDRVKDLATVYVDVLKDSGRDYVSQFEGSALGKQLNLKLLDNWDSVTSTFSKLREQLGPVTQEFWDNLEKETEGLRQEMSKDLEEVKAKVQPYLDDFQKKWQEEMELYRQKVEPLRAELQEGARQKLHELQEKLSPLGEEMRDRARAHVDALRTHLAPYSDELRQRLAARLEALKENGGARLAEYHAKATEHLSTLSEKAKPALEDLRQGLLPVLESFKVSFLSALEEYTKKLNTQ

SEQ ID NO: 77 - protein, 267 aa, Macaca fascicularis
MKATVLTLAVLFLTGSQARHFWQQDEPPQTPWDRVKDLVTVYVEALKDSGKDYVSQFEGSALGKQLNLKLLDNWDSVTSTVSKLREQLGPVTQEFWDNLEKETEGLRQEMSKDLEEVKAKVQPYLDDFQKKWQEEMELYRQKVEPLRAELHEGTRQKLHELHEKLSPLGEEVRDRARAHVDALRTHLAPYSDELRQRLAARLEALKENGGARLAEYHAKASEHLSTLSEKAKPALEDLRQGLLPVLESFKVSFLSALEEYTKKLSTQ

SEQ ID NO: 78 - protein, 267 aa, Macaca fascicularis
MKATVLTLAVLFPTGSQARHFWQQDEPPQTPWDRVKDLVTVYVEALKDSGKDYVSQFEGSALGKQLNLKLLDNWDSVTSTVSKLREQLGPVTQEFWDNLEKETEGLRQEMSKDLEEVKAKVQPYLDDFQKKWQEEMELYRQKVEPLRAELHEGTRQKLHELHEKLSPLGEEVRDRARAHVDALRTHLAPYSDELRQRLAARLEALKENGGARLAEYHAKASEHLSTLSEKAKPALEDLRQGLLPVLESFKVSFLSALEEYTKKLSTQ

SEQ ID NO: 79 - protein, 262 aa, Artificial Sequence
  Description of Artificial Sequence: Apolipoprotein Consensus Sequence
KALVLALALLLLTGCQARFWQADEPQSQWDQVKDRFWVYLRQVKDSADQAVEQLESSQVTQELNLLLQDNLDELKSYAEELQEQLGPVAQEFWARLSKETQALRAELGKDLEDVRNRLAPYRDELQQMLGQNIEEYRQKLEPLARELRKRLRRDAEELQKRLAPYAEELRERAERNVDALRTRLGPYVEQLRQKLTQRLEELRERAQPYAEEYKEQLEEQLSELREKLAPLREDLQEVLNPVLEQLKTQAEAFQEELKSWLE

SEQ ID NO: 80 - protein, 160 aa, Homo sapiens; identical to SEQ ID NO: 18

SEQ ID NO: 81 - protein, 160 aa, Mus musculus
MQPASAKWYDRRDYVFIEFCVEDSKDVNVNFEKSKLTFSCLGGSDNFKHLNEIDLFHCIDPNDSKHKRTDRSILCCLRKGESGQSWPRLTKERAKLNWLSVDFNNWKDWEDDSDEDMSNFDRFSEMMDHMGGDEDVDLPEVDGADDDSQDSDDEKMPDLE

SEQ ID NO: 82 - protein, 160 aa, Mus musculus
MQPASAKWYDRRDYVFIEFCVEDSKDVNVNFEKSKLTFSCLGGSDNFKHLNEIDLFHCIDPNDSKHKRTDRSILCCLRKGESGQSWLGLTKERAKLNWLSVDFNNWKDWEDDSDEDMSNFDRFSEMMDHMGGDEDVDLPEVDGADDDSQDSDDEKMPDLE

SEQ ID NO: 83 - protein, 160 aa, Gallus gallus
MQPASAKWYDRRDYVFIEFCVEDSKDVNVNFEKSKLTFSCLGGSDNFKHLNEIDLFNNIDPNESKHKRTDRSILCCLRKGESGQAWPRLTKERAKLNWLSVDFNNWKDWEDDSDEDMSNFDRFSEMMNNMGGDDDVDLPEVDGADDDSPDSDDEKMPDLE

SEQ ID NO: 84 - protein, 125 aa, Homo sapiens
MQPASAKWYDRRDYVFIEFCVEDSKDVNVNFEKSKLTFSCLGGSDNFKHLNEIDLFHCIDPNDSKHKRTDRSILCCLRKGESGQSWPRLTKERAKLNWLSVDFNNWKDWEDDSDEDMSNFDRFSE

SEQ ID NO: 85 - protein, 1144 aa, Rattus norvegicus
MTEDQGFSDPEYSAEYSAEYSVSLPSDPDRGVGRTHEISVRNSGSCLCLPRFMRLTFVPESLENLYQTYFKRQRHETLLVLVVFAALFDCYVVVMCAVVFSSDKLAPLMVAGVGLVLDIILFVLCKKGLLPDRVSRKVVPYLLWLLITAQIFSYLGLNFSRAHAASDTVGWQAFFVFSFFITLPLSLSPIVIISVVSCVVHTLVLGVTVAQQQQDELEGMQLLREILANVFLYLCAIIVGIMSYYMADRKHRKAFLEARQSLEVKMNLEEQSQQQENLMLSILPKHVADEMLKDMKKDESQKDQQQFNTMYMYRHENVSILFADIVGFTQLSSACSAQELVKLLNELFARFDKLAAKYHQLRIKILGDCYYCICGLPDYREDHAVCSILMGLAMVEAISYVREKTKTGVDMRVGVHTGTVLGGVLGQKRWQYDVWSTDVTVANKMEAGGIPGRVHISQSTMDCLKGEFDVEPGDGGSRCDYLDEKGIETYLIIASKPEVKKTAQNGLNGSALPNGAPASKPSSPALIETKEPNGSAHASGSTSEEAEEQEAQADNPSFPNPRRRLRLQDLADRVVDASEDEHELNQLLNEALLERESAQVVKKRNTFLLTMRFMDPEMETRYSVEKEKQSGAAFSCSCVVLFCTAMVEILIDPWLMTNYVTFVVGEVLLLILTICSMAAIFPRAFPKKLVAFSSWIDRTRWARNTWAMLAIFILVMANVVDMLSCLQYYMGPYNVTTGIELDGGCMENPKYYNYVAVLSLIATIMLVQVSHMVKLTLMLLVTGAVTAINLYAWCPVFDEYDHKRFQEKDSPMVALEKMQVLSTPGLNGTDSRLPLVPSKYSMTVMMFVMMLSFYYFSRHVEKLARTLFLWKIEVHDQKERVYEMRRWNEALVTNMLPEHVARHFLGSKKRDEELYSQSYDEIGVMFASLPNFADFYTEESINNGGIECLRFLNEIISDFDSLLDNPKFRVITKIKTIGSTYMAASGVTPDVNTNGFTSSSKEEKSDKERWQHLADLADFALAMKDTLTNINNQSFNNFMLRIGMNKGGVLAGVIGARKPHYDIWGNTVNVASRMESTGVMGNIQVVEETQVILREYGFRFVRRGPIFVKGKGELLTFFLKGRDRPAAFPNGSSVTLPHQVVDNP

SEQ ID NO: 86 - protein, 1144 aa, Homo sapiens
MPRNQGFSEPEYSAEYSAEYSVSLPSDPDRGVGRTHEISVRNSGSCLCLPRFMRLTFVPESLENLYQTYFKRQRHETLLVLVVFAALFDCYVVVMCAVVFSSDKLAPLAVAGIGLVLDIILFVLCKKGLLPDRVTRRVLPYVLWLLITAQIFSYLGLNFARAHAASDTVGWQVFFVFSFFITLPLSLSPIVIISVVSCVVHTLVLGVTVAQQQQEELKGMQLLREILANVFLYLCAIAVGIMSYYMADRKHRKAFLEARQSLEVKMNLEEQSQQQENLMLSILPKHVADEMLKDMKKDESQKDQQQFNTMYMYRHENVSILFADIVGFTQLSSACSAQELVKLLNELFARFDKLAAKYHQLRIKILGDCYYCICGLPDYREDHAVCSILMGLAMVEAISYVREKTKTGVDMRVGVHTGTVLGGVLGQKRWQYDVWSTDVTVANKMEAGGIPGRVHISQSTMDCLKGEFDVEPGDGGSRCDYLEEKGIETYLIIASKPEVKKTATQNGLNGSALPNGAPASSKSSSPALIETKEPNGSAHSSGSTSEKPEEQDAQADNPSFPNPRRRLRLQDLADRVVDASEDEHELNQLLNEALLERESAQVVKKRNTFLLSMRFMDPEMETRYSVEKEKQSGAAFSCSCVVLLCTALVEILIDPWLMTNYVTFMVGEILLLILTICSLAAIFPRAFPKKLVAFSTWIDRTRWARNTWAMLAIFILVMANVVDMLSCLQYYTGPSNATAGMETEGSCLENPKYYNYVAVLSLIATIMLVQVSHMVKLTLMLLVAGAVATINLYAWRPVFDEYDHKRFREHDLPMVALEQMQGFNPGLNGTDRLPLVPSKYSMTVMVFLMMLSFYYFSRHVEKLARTLFLWKIEVHDQKERVYEMRRWNEALVTNMLPEHVARHFLGSKKRDEELYSQTYDEIGVMFASLPNFADFYTEESINNGGIECLRFLNEIISDFDSLLDNPKFRVITKIKTIGSTYMAASGVTPDVNTNGFASSNKEDKSERERWQHLADLADFALAMKDTLTNINNQSFNNFMLRIGMNKGGVLAGVIGARKPHYDIWGNTVNVASRMESTGVMGNIQVVEETQVILREYGFRFVRRGPIFVKGKGELLTFFLKGRDKLATFPNGPSVTLPHQVVDNS

SEQ ID NO: 87 - protein, 933 aa, Drosophila melanogaster
QQQEELKGMQLLREILANVFLYLCAIAVGIMSYYMADRKHRKAFLEARQSLEVKMNLEEQSQQQENLMLSILPKHVADEMLKDMKKDESQKDQQQFNTMYMYRHENVSILFADIVGFTQLSSACSAQELVKLLNELFARFDKLAAKYHQLRIKILGDCYYCICGLPDYREDHAVCSILMGLAMVEAISYVREKTKTGVDMRVGVHTGTVLGGVLGQKRWQYDVWSTDVTVANKMEAGGIPGRVHISQSTMDCLKGEFDVEPGDGGSRCDYLEEKGIETYLIIASKPEVKKTATQNGLNGSALPNGAPASSKSSSPALIETKEPNGSAHSSGSTSEKPEEQDAQADNPSFPNPRRRLRLQDLADRVVDASEDEHELNQLLNEALLERESAQVVKKRNTFLLSMRFMDPEMETRYSVEKEKQSGAAFSCSCVVLLCTALVEILIDPWLMTNYVTFMVGEILLLILTICSLAAIFPRAFPKKLVAFSTWIDRTRWARNTWAMLAIFILVMANVVDMLSCLQYYTGPSNATAGMETEGSCLENPKYYNYVAVLSLIATIMLVQVSHMVKLTLMLLVAGAVATINLYAWRPVFDEYDHKRFREHDLPMVALEQMQGFNPGLNGTDRLPLVPSKYSMTVMVFLMMLSFYYFSRHVEKLARTLFLWKIEVHDQKERVYEMRRWNEALVTNMLPEHVARHFLGSKKRDEELYSQTYDEIGVMFASLPNFADFYTEESINNGGIECLRFLNEIISDFDSLLDNPKFRVITKIKTIGSTYMAASGVTPDVNTNGFASSNKEDKSERERWQHLADLADFALAMKDTLTNINNQSFNNFMLRIGMNKGGVLAGVIGARKPHYDIWGNTVNVASRMESTGVMGNIQVVEETQVILREYGFRFVRRGPIFVKGKGELLTFFLKGRDKLATFPNGPSVTLPHQVVDNS

SEQ ID NO: 88 - protein, 1167 aa, Drosophila melanogaster
MEANLENGQKTIASTSKSHSQRQTTSRRRQNDSDVAGGVGITGGGVVILPQHVLNELYHNYSIKQRRSGLKWFVFAAALFNIWTIGIPWDQSAPTRVINCCMLLAYLALTALLHIGRRSDKPALRRFHQILLIIVPRALWLLSILHFTVYVILQPSFSPRDLLGWAILLNFLVYVTLPLQLIFLGLSIGCITYFICLSLPVGYSHWDSLLSNQLAANAVLIATAALIGLLYYFMGEAKQKRAFLEAKKSLEVKMVIEEQSAEQERLLLSVLPKHVAIKMREDLGSSSSEAFKKIYMSRHENVSILYADIVGFTAISSTYSAQDLVKMLNELFARFDRLAEKYQQLRIKILGDCYYCISGAPDERPDHAVLCVHMGLSMVKAIKYVQQKANSPVDMRVGIHTGAVLAGILGQRQWQFDVYSKDVELANKMESSGKAGRVHISDKTLAFLNGEFEVEAAFGEKREELLRIAGLKTYFITKVVKAFASPCAKKINETQAEIAHPNPNGSTTDIVSDEDDNDATLDDEELLAQNSVSNGHQIGIAVTADEEEQVKLENFKQRLKDELVTRDGHENLTKDTNIFLRFKNPQLEQLYAVYREPYSSLPLLAALLVQCIDVLYSYLVLPRSTLHFINIAAPLVPIAMLVVISLAESFSGMLPKFFVDVSKRFNDITFVRELAAIIIALTIGFSNVIDMFFFVTFVRTEHIVSESEFNVTASLESDINLVVEGMVTAEHLLPASFVEQMRDAVPTERVLYPSYLSNFGVLILIAIAVIAQLTHLTKILLLLSIAALHCYFNIFIMQDLYALEDDFEHQPIISTRYAASGLLLVAALALSTLARHMDHEDRVIFKWKTEVAEQKETANDMRQRNEALVYNVLPVHVAEHFMKNTKRSHDDLYSQSYAEVGVLFASMPNFSDFYSEETVNNQGLECLRFLNEVISDFDALLELPQFQDIIKIKTIGSTYMAASGINVQRTVRNDAPITERWSHLAILVEFALELKHALQSINEQSFNHFVLKMGINHGPITAGVIGARKPHYDIWGNTVNVASRMESTGKAGAIQVTEETCNILRLFGYTFLQRGLVAVKGKGQLMTFYLQGKSQSSAEPVASGVVVLNGQDSSAVESTSELEASDIKMPLLKMNGPEQSLEIDQDRSLRNDSAGQESVAECQSLLE

SEQ ID NO: 89 - protein, 262 aa, Mus musculus
MFANKLLTCSALLIMLFLLSSTVFSQKLIGLPRVGKNVSDLFLEQANPLTSSSSTISTSSTTTEKPITTRSTSTITPRSTTPSTESPSTTAPVISTTIAPQPYPQPSIGAWNTSCIMLQMAAQLNFTYEAREGNFTTGLYNIPSNASVEDAECKSQTTQFIHLIWGPETSKQSLIMYFNKSNDTTVLSFMQIHLALLPEDFPDAKENQTVQLITRSDGAFKTPENMSYHCTRVQKINMTETLDAEQLIGWISVSHVQVEAFR

SEQ ID NO: 90 - protein, 185 aa, Artificial Sequence
  Description of Artificial Sequence: Adenylate and Guanylate cyclase Consensus Sequence
VYAERYDEVTILFADIVGFTALSERHSPEEVVRLLNELFTRFDELVDAHGGYKVKTIGDAYMAASGLPPASAAHAAKLADFALAMVEALEEVNVGHTEPLRLRIGIHTGPVVAGVIGAKRPRYDVWGDTVNVASRMESLGVPGKIHVSESTYRLLNGLESFQFRFPRGEVSVKGKGKPMKTYFLH

SEQ ID NO: 91 - protein, 194 aa, Artificial Sequence
  Description of Artificial Sequence: Adenylyl/guanylyl cyclase Consensus Sequence
EEKRKNDRLLDQLLPASVAESLKRGGEPVPAPSYDEVTILFTDIVGFTALSSAATPEQVVTLLNDLYSRFDRIIDRHGGYKVKTIGDAYMVVSGLPTAALVQHAELAALEALDMVESLKTVLVQHRGNGLRVRIGIHTGPVVAGVVGITMPRYCLFGDTVNLASRMESVGDPGQIQVSEETYSLLRRRSGQFEF

SEQ ID NO: 92 - protein, 562 aa, Homo sapiens [sequence omitted]

SEQ ID NO: 93 - protein, 603 aa, Homo sapiens
MTGLVSLSYFPLSTRSCALQSCRQPGLGMWSLLLCGLSIALPLSVTADGCKDIFMKNEILSASQPFAFNCTFPPITSGEVSVTWYKNSSKIPVSKIIQSRIHQDETWILFLPMEWGDSGVYQCVIKGRDSCHRIHVNLTVFEKHWCDTSIGGLPNLSDEYKQILHLGKDDSLTCHLHFPKSCVLGPIKWYKDCNEIKGERFTVLETRLLVSNVSAEDRGNYACQAILTHSGKQYEVLNGITVSITERAGYGGSVPKIIYPKNHSIEVQLGTTLIVDCNVTDTKDNTNLRCWRVNNTLVDDYYDESKRIREGVETHVSFREHNLYTVNITFLEVKMEDYGLPFMCHAGVSTAYIILQLPAPDFRAYLIGGLIALVAVAVSVVYIYNIFKIDIVLWYRSAFHSTETIVDGKLYDAYVLYPKPHKESQRHAVDALVLNILPEVLERQCGYKLFIFGRDEFPGQAVANVIDENVKLCRRLIVIVVPESLGFGLLKNLSEEQIAVYSALIQDGMKVILIELEKIEDYTVMPESIQYIKQKHGAIRWHGDFTEQSQCMKTKFWKTVRYHMPPRRCRPFPPVQLLQHTPCYRTAGPELGSRRKKCTLTTG

SEQ ID NO: 94 - protein, 575 aa, Homo sapiens [sequence omitted]

SEQ ID NO: 95 - protein, 561 aa, Rattus norvegicus
MGMPPLLFCWVSFVLPLFVAAGNCTDVYMHHEMISEGQPFPFNCTYPPVTNGAVNLTWHRTPSKSPISINRHVRIHQDQSWILFLPLALEDSGIYQCVIKDAHSCYRIAINLTVFRKHWCDSSNEESSINSSDEYQQWLPIGKSGSLTCHLYFPESCVLDSIKWYKGCEEIKVSKKFCPTGTKLLVNNIDVEDSGSYACSARLTHLGRIFTVRNYIAVNTKEVGSGGRIPNITYPKNNSIEVQLGSTLIVDCNITDTKENTNLRCWRVNNTLVDDYYNDFKRIQEGIETNLSLRNHILYTVNITFLEVKMEDYGHPFTCHAAVSAAYIILKRPAPDFRAYLIGGLMAFLLLAVSILYIYNTFKVDIVLWYRSTFHTAQAPDDEKLYDAYVLYPKYPRESQGHDVDTLVLKILPEVLEKQCGYKLFIFGRDEFPGQAVASVIDENIKLCRRLMVLVAPETSSFSFLKNLTEEQIAVYNALVQDGMKVILIELERVKDYSTMPESIQYIRQKHGAIQWDGDFTEQAQCAKTKFWKKVRYHMPPRRYPASPPVQLLGHTPRIPG

SEQ ID NO: 96 - protein, 574 aa, Mus musculus
MGVTSLLFCGVFFLLLLFVAADTCEDIFMHNVIISEGQPFPFNCTYPPETNGAVNLTWYKTPSKSPVSNNRHLRVHQDQTWILFLPLTLEDSGIYQCVIRNAHNCYQIAVNLTVLKNHWCDSSMEGSPVNSPDVYQQILPIGKSGSLNCHLYFPESCALDSIKWYKGCEEIKAGKKYSPSGAKLLVNNVAVEDGGSYACSARLTHLGRHFTIRNYIAVNTKEVEYGRRIPNITYPKNNSIEVPLGSTLIVNCNITDTKENTNLRCWRVNNTLVDDYYKDSKRIQEGIETNVSLRDQIRYTVNITFLKVKMEDYGRPFTCHAGVSAAYIILIYPVPDFRAYLLGGLMAFLLLVVSVLFIYNSFKIDIMLWYRSAFHTAQAPDDEKLYDAYVLYPKYPRGSQGHDVDTLVLKILPEVLEKQCGYKLFIFGRDEFPGQAVASVIDENIKLCRRLMVFVAPESSSFGFLKNLSEEQIAVYNALIQHGMKVILIELEKVKDYSTMPESIQYIRQKHGAIQWDGDFTEQSQCAKTKFWKKVRYHMPPRRYPASSPVQLLGHIPCNCKAGKCNAATGLITP

SEQ ID NO: 97 - protein, 141 aa, Artificial Sequence
  Description of Artificial Sequence: TIR domain Consensus Sequence
AFISFSGKDDRDTFVSHLLKELEEKPGIKLFIDDRDELPGESILENLFEAIEKSRRAIVILSSNYASSSWCLDELVEAVKLALEQGNKKVILPIFYKVDPSDVRKQSGKFGKAFLKTLKWFGDKTSQRIRFWKKALYAMPV

SEQ ID NO: 98 - protein, 140 aa, Artificial Sequence
  Description of Artificial Sequence: Toll domain Consensus Sequence
EYDVFISYSGDEDVRNEFLSHLLEQLRGYKLCVFIDDFEPGGGDLENIDEAIEKSRIAIVVLSPNYAESEWCLDELVAALENALEQGGLRVIPIFYEVIPSDVRKQPGSFRKVFKKNYLKWTEDEKDRFWKKALYAVPSK

SEQ ID NO: 99 - protein, 576 aa, Rattus norvegicus
MENMKVLLGFICLIVPLLSLETDKCTEYPNEVISFSSVNEIDIRSCPLTPNEMHGGTIIWYKNDSKTPISADKDSRIHQQNEHLWFVPAKMEDSGYYYCIMRNSTYCLKTKITMSVLENDPGLCYNTQASFIQRLHVAGDGSLVCPYLDFFKDENNELPKVQWYKNCKPLPLDDGNFFGFKNKLMVMNVAEEHRGNYTCRTSYTYQGKQYPVTRVITFITIDDSKRDRPVIMSPRNETMEADPGSTIQLICNVTGQFTDLVYWKWNGSEIEWDDPILAEDYQFLEHPSAKRKYTLITTLNVSEVKSQFYRYPFICFVKNTHILETAHVRLVYPVPDFKNYLIGGFAIFTATAVFCACIYKVFKVDIVLWYRDSCSDFLPRKASDGRTYDAYVLYPKTYGEGSFAYLDTFVFKLLPEVLEGQFGYKLFICGRDDYVGEDTIEVTNENVKRSRRLIIILVRDMGSFSCLGQSSEEQIAIYDALIREGIKIILLELEKIQDYEKMPESIQFIKQKHGAICWSGDFKERPQSAKTRFWKNLRYQMPAQRRSPLSKHHLLTLDPVLDTKEKLQAETHLPLG

SEQ ID NO: 100 - protein, 63 aa, Artificial Sequence
  Description of Artificial Sequence: IGc2 Consensus Sequence
LEGESVTLTCPASGDPVPNITWLKDGKPLPESRVVASGSTLTIKNVSLEDSGLYTCVARNSVG

SEQ ID NO: 101 - protein, 68 aa, Artificial Sequence
  Description of Artificial Sequence: Ig Domain Consensus Sequence
GESVTLTCSVSGYPPDPTVTWLRDGKEIELLGSSESRVSSGGRFSISSLSLTISSVTPEDSGTYTCVV

SEQ ID NO: 102 - protein, 435 aa, Homo sapiens
MGDWSFLGRLLENAQEHSTVIGKVWLTVLFIFRILVLGAAAEDVWGDEQSDFTCNTQQPGCENVCYDRAFPISHIRFWALQIIFVSTPTLIYLGHVLHIVRMEEKKKEREEEEQLKRESPSPKEPPQDNPSSRDDRGRVRMAGALLRTYVFNIIFKTLFEVGFIAGQYFLYGFELKPLYRCDRWPCPNTVDCFISRPTEKTIFIIFMLAVACASLLLNMLEIYHLGWKKLKQGVTSRLGPDASEAPLGTADPPPLPPSSRPPAVAIGFPPYYAHTAAPLGQARAVGYPGAPPPAADFKMLALTEARGKGQSAKLYNGHHHLLMTEQNWANQAAERQPPALKAYPAASTPAAPSPVGSSSPPLAHEAEAGAAPLLLDGSGSSLEGSALAGTPEEEEQAVTTAAQMHQPPLPLGDPGRASKASRASSGRARPEDLAI

SEQ ID NO: 103 - protein, 435 aa, Homo sapiens
MGDWSFLGRLLENAQEHSTVIGKVWLTVLFIFRILVLGAAAEDVWGDEQSDFTCNTQQPGCENVCYDRAFPISHIRFWALQIIFVSTPTLIYLGHVLHIVRMEEKKKEREEEEQLKRESPSPKEPPQDNPSSRDDRGRVRMAGALLRTYVFNIIFKTLFEVGFIAGQYFLYGFELKPLYRCDRWPCPNTVDCFISRPTEKTIFIIFMLAVACASLLLNMLEIYHLGWKKLKQGVTSRLGPDASEAPLGTADPPPLPPSSRPPAVAIGFPPYYAHTAAPLGQARAVGYPGAPPPAADFKLLALTEARGKGQSAKLYNGHHHLLMTEQNWANQAAERQPPALKAYPAASTPAAPSPVGSSSPPLAHEAEAGAAPLLLDGSGSSLEGSALAGTPEEEEQAVTTAAQMHQPPLPLGDPGRASKASRASSGRARPEDLAI

SEQ ID NO: 104 - protein, 417 aa, Mus musculus
MGDWSFLGRLLENAQEHSTVIGKVWLTVLFIFRILVLGAAAEEVWGDEQSDFTCNTQQPGCENVCYDRAFPISHIRFWALQIIFVSTPTLIYLGHVLHIVRMEEKKKEREEELLRRDNPQHGRGREPMRTGSPRDPPLRDDRGKVRIAGALLRTYVFNIIFKTLFEVGFIAGQYFLYGFQLQPLYRCDRWPCPNTVDCFISRPTEKTIFVIFMLAVACASLVLNMLEIYHLGWKKLKQGVTNHFNPDASEARHKPLDPLPAATSSGPPSVSIGFPPYYTHPACPTVQGKAIGFPGAPLSPADFTVVTLNDAQGRNHPVKHCNGHHLTTEQNWTRQVAEQQTPASKPSSAASSPDGRKGLIDSSGSSLQESALVVTPEEGEQALATTVEMYSPPLVLLDPGRSSKSSNGRARPGDLAI

SEQ ID NO: 105 - protein, 416 aa, Rattus norvegicus
MGDWSFLGRLLENAQEHSTVIGKVWLTVLFIFRILVLGAAAEEVWGDEQSDFTCNTQQPGCENVCYDRAFPISHIRFWALQIIFVSTPTLIYLGHVLHIVRMEEKKKEREEELLRRDNPQHGRGREPMRTGSPRDPPLRDDRGKVRIAGALLRTYVFNIIFKTLFEVGFIAGQYFLYGFQLQPLYRCDRWPCPNTVDCFISRPTEKTIFVIFMLAVACASLVLNMLEIYHLGWKKLKQGVTNHFNPDASEVRHKPLDPLSEAANSGPPSVSIGLPPYYTHPACPTVQGKATGFPGAPLLPADFTVVTLNDAQGRGHPVKHCNGHHLTTEQNWASLGAEPQTPASKPSSAASSPHGRKGLTDSSGSSLEESALVVTPEGEQALATTVEMHSPPLVLLDPERSSKSSSGRARPGDLAI

SEQ ID NO: 106 - protein, 413 aa, Ovis aries
MGDWSFLGRLLENAQEHSTVIGKVWLTVLFIFRILVLGAAAEEVWGDEQSDFTCNTQQPGCENVCYDRAFPISHVRFWVLQIIFVSTPTLIYLGHVLHLVRMEEKRKEREEEPPKAAGPAEEHQDPAPVRDDRGKVRIAGALLRTYVFNIIFKTLFEVGFIAGQYFLYGFQLKPLYRCDRWPCPNTVDCFISRPTEKTIFILFMLAVACVSLLLNVLEIYHLGWKKLKQGMTSPFRPDTPGSRAGSAKPMGGSPLLLPPNSAPPAVTIGFPPYYAPSASSLGQASAPGYPEPPLPAALPGTPGTPGTPGTLGGGGGNQGLRAPAQNCANREAEPQTSARKASPPASTPPAAPAGGPQQFLPGGAAGSSGDSDGEGAVTAVELHAPPEPPADPGRSSKASKSSGGRARAADLAI

SEQ ID NO: 107 - protein, 218 aa, Artificial Sequence
  Description of Artificial Sequence: Connexin Consensus Sequence
MDWSFLGRLLEGVNKHSTAIGKIWLSVLFIFRILVLGVAAESVWGDEQSDFVCNTQQPGCENVCYDQFFPISHVRLWVLQLIFVSTPSLLYLGHVAYRVRREEKLREKEEEHSKGLYSEEAKKRCGSEDGKVRIRGGLWWTYVFSIIFKSIFEVGFLYGQYLLYGFTMSPLVVCSRAPCPHTVDCFVSRPTEKTIFIVFMLVVSAICLLLNLAELFYL

SEQ ID NO: 108 - protein, 34 aa, Artificial Sequence
  Description of Artificial Sequence: Connexin Homologue Consensus Sequence
SVWGDEQSDFTCNTQQPGCENVCYDQFFPISHVR

SEQ ID NO: 109 - protein, 312 aa, Homo sapiens
MDQKNGSSFTGFILLGFSDRPQLELVLFVVLLIFYIFTLLGNKTIIVLSHLDPHLHTPMYFFFSNLSFLDLCYTTGIVPQLLVNLRGADKSISYGGCVVQLYISLGLGSTECVLLGVMVFDRYAAVCRPLHYTVVMHPCLYVLMASTSWVIGFANSLLQTVLILLLTLCGRNKLEHFLCEVPPLLKLACVDTTMNESELFFVSVIILLVPVALIIFSYSQIVRAVMRIKLATGQRKVFGTCGSHLTVVSLFYGTAIYAYLQPGNNYSQDQGKFISLFYTIITPMINPLIYTLRNKDVKGALKKVLWKNYDSR

SEQ ID NO: 110 - protein, 252 aa, Homo sapiens
MQISNTSFLDLCYTTGIVPQLLVNLRGADKSISYGGCVVQLYISLGLGSTECVLLGVMAFDRYAAVCRPLHYTVVMHPCLYVLMASTSWVIGFANSLLQTVLILLLTLCGRNKLEHFLCEVPPLLKLACVDTTMNESELFFVSVIILLVPVALIIFSYSQIVRAVVRIKSATGQRKVFGTCGSHLTVVSLFYGTAIYAYLQPGNNYSQDQGKFISLFYTIITPMINPLIYTLRNKDVKGALKKVLWKNYDSR

SEQ ID NO: 111 - protein, 309 aa, Homo sapiens
MGLGNESSLMDFILLGFSDHPRLEAVLFVFVLFFYLLTLVGNFTIIIISYLDPPLHTPMYFFLSNLSLLDICFTTSLAPQTLVNLQRPKKTITYGGCVAQLYISLALGSTECILLADMALDRYIAVCKPLHYVVIMNPRLCQQLASISWLSGLASSLIHATFTLQLPLCGNHRLDHFICEVPALLKLACVDTTVNELVLFVVSVLFVVIPPALISISYGFITQAVLRIKSVEARHKAFSTCSSHLTVVIIFYGTIIYVYLQPSDSYAQDQGKFISLFYTMVTPTLNPIIYTLRNKDMKEALRKLLSGKL

SEQ ID NO: 112 - protein, 357 aa, Homo sapiens
MNWVNKSVPQEFILLVFSDQPWLEIPPFVMFLFSYILTIFGNLTIILVSHVDFKLHTPMYFFLSNLSLLDLCYTTSTVPQMLVNICNTRKVISYGGCVAQLFIFLALGSTECLLLAVMCFDRFVAICRPLHYSIIMHQRLCFQLAAASWISGFSNSVLQSTWTLKMPLCGHKEVDHFFCEVPALLKLSCVDTTANEAELFFISVLFLLIPVTLILISYAFIVQAVLRIQSAEGQRKAFGTCGSHLIVVSLFYGTAISMYLQPPSPSSKDRGKMVSLFCGIIAPMLNPLIYTLRNKEVKEAFKRLVAKSLLNQEIRNMQMISFAKDTVLTYLTNFSASCPIFVITIENYCNLPQRKFP

SEQ ID NO: 113 - protein, 320 aa, Homo sapiens
MDQSNYSSLHGFILLGFSNHPKMEMILSGVVAIFYLITLVGNTAIILASLLDSQLHTPMYFFLRNLSFLDLCFTTSIIPQMLVNLWGPDKTISYVGCIIQLYVYMWLGSVECLLLAVMSYDRFTAICKPLHYFVVMNPHLCLKMIIMIWSISLANSVVLCTLTLNLPTCGNNILDHFLCELPALVKIACVDTTTVEMSVFALGIIIVLTPLILILISYGYIAKAVLRTKSKASQRKAMNTCGSHLTVVSMFYGTIIYMYLQPGNRASKDQGKFLTLFYTVITPSLNPLIYTLRNKDMKDALKKLMRFHHKSTKIKRNCKS

SEQ ID NO: 114 - protein, 254 aa, Artificial Sequence
  Description of Artificial Sequence: 7 transmembrane receptor Consensus Sequence
GNLLVILVILRTKKLRTPTNIFLLNLAVADLLFLLTLPPWALYYLVGGDWVFGDALCKLVGALFVVNGYASILLLTAISIDRYLAIVHPLRYRRIRTPRRAKVLILLVWVLALLLSLPPLLFSWLRTVEEGNTTVCLIDFPEESVKRSYVLLSTLVGFVLPLLVILVCYTRILRTLRKRARSQRSLKRRSSSERKAAKMLLVVVVVFVLCWLPYHIVLLLDSLCLLSIWRVLPTALLITLWLAYVNSCLNPIIY

SEQ ID NO: 115 - protein, 520 aa, Homo sapiens
MPQLSLSSLGLWPMAASPWLLLLLVGASWLLARILAWTYTFYDNCCRLRCFPQPPKRNWFLGHLGLIHSSEEGLLYTQSLACTFGDMCCWWVGPWHAIVRIFHPTYIKPVLFAPAAIVPKDKVFYSFLKPWLGDGLLLSAGEKWSRHRRMLTPAFHFNILKPYMKIFNESVNIMHAKWQLLASEGSARLDMFEHISLMTLDSLQKCVFSFDSHCQEKPSEYIAAILELSALVTKRHQQILLYIDFLYYLTPDGQRFRRACRLVHDFTDAVIQERRRTLPSQGVDDFLQAKAKSKTLDFIDVLLLSKDEDGKKLSDEDIRAEADTFMFEGHDTTASGLSWVLYHLAKHPEYQERCRQEVQELLKDREPKEIEWDDLAQLPFLTMCIKESLRLHPPVPAVSRCCTQDIVLPDGRVIPKGIICLISVFGTHHNPAVWPDPEVYDPFRFDPKNIKERSPLAFIPFSAGPRNCIGQAFAMAEMKVVLGLTLLRFRVLPDHTEPRRKPELVLRAEGGLWLRVEPLS

SEQ ID NO: 116 - protein, 520 aa, Homo sapiens [sequence omitted]

SEQ ID NO: 117 - protein, 520 aa, Homo sapiens
MPQLSLSSLGLWPMAASPWLLLLLVGASWLLARILAWTYTFYDNCCRLRCFPQPPKRNWFLGHLGLIHSSEEGLLYTQSLACTFGDMCCWWVGPWHAIVRIFHPTYIKPVLFAPAAIVPKDKVFYSFLKPWLGDGLLLSAGEKWSRHRRMLTPAFHFNILKPYMKIFNESVNIMHAKWQLLASEGSARLDMFEHISLMTLDSLQKCVFSFDSHCQEKPSEYIAAILELSALVTKRHQQILLYIDFLYYLTPDGQRFRRACRLVHDFTDDVIQERRRTLPSQGVDDFLQAKAKSKTLDFIDVLLLSKDEDGKKLSDEDIRAEADTFMFEGHDTTASGLSWVLYHLAKHPEYQERCRQEVQELLKDREPKEIEWDDLAQLPFLTMCIKESLRLHPPVPAVSRCCTQDIVLPDGRVIPKGIICLISVFGTHHNPAVWPDPEVYDPFRFDPKNIKERSPLAFIPFSAGPRNCIGQAFAMAEMKVVLGLTLLAFRVLPDHTEPRRKPELVLRAEGGLWLRVEPLS

SEQ ID NO: 118 - protein, 520 aa, Homo sapiens
MSQLSLSWLGLWPVAASPWLLLLLVGASWLLAHVLAWTYAFYDNCRRLRCFPQPPRRNWFWGHQGMVNPTEEGMRVLTQLVATYPQGFKVWMGPISPLLSLCHPDIIRSVINASAAIAPKDKFFYSFLEPWLGDGLLLSAGDKWSRHRRMLTPAFHFNILKPYMKIFNESVNIMHAKWQLLASEGSACLDMFEHISLMTLDSLQKCVFSFDSHCQEKPSEYIAAILELSALVSKRHHEILLHIDFLYYLTPDGQRFRRACRLVHDFTDAVIQERRRTLPSQGVDDFLQAKAKSKTLDFIDVLLLSKDEDGKKLSDEDIRAEADTFMFEGHDTTASGLSWVLYHLAKHPEYQERCRQEVQELLKDREPKEIEWDDLAHLPFLTMCMKESLRLHPPVPVISRHVTQDIVLPDGRVIPKGIICLISVFGTHHNPAVWPDPEVYDPFRFDPENIKERSPLAFIPFSAGPRNCIGQTFAMAEMKVVLALTLLRFRVLPDHTEPRRKPELVLRAEGGLWLRVEPLS

SEQ ID NO: 119 - protein, 520 aa, Homo sapiens [sequence omitted]

SEQ ID NO: 120 - protein, 966 aa, Homo sapiens
MAAVAAVAARRRRSWASLVLAFLGVCLGITLAVDRSNFKTCEESSFCKRQRSIRPGLSPYRALLDSLQLGPDSLTVHLIHEVTKVLLVLELQGLQKNMTRFRIDELEPRRPRYRVPDVLVADPPIARLSVSGRDENSVELTMAEGPYKIILTARPFRLDLLEDRSLLLSVNARGLLEFEHQRAPRVSFSDKVNLTLGSIWDKIKNLFSRQGSKDPAEGDGAQPEETPRDGDKPEETQGKAEKDEPGAWEETFKTHSDSKPYGPMSVGLDFSLPGMEHVYGIPEHADNLRLKVTEGGEPYRLYNLDVFQYELYNPMALYGSVPVLLAHNPHRDLGIFWLNAAETWVDISSNTAGKTLFGKMMDYLQGSGETPQTDVRWMSETGIIDVFLLLGPSISDVFRQYASLTGTQALPPLFSLGYHQSRWNYRDEADVLEVDQGFDDHNLPCDVIWLDIEHADGKRYFTWDPSRFPQPRTMLERLASKRRKLVAIVDPHIKVDSGYRVHEELRNLGLYVKTRDGSDYEGWCWPGSAGYPDFTNPTMRAWWANMFSYDNYEGSAPNLFVWNDMNEPSVFNGPEVTMLKDAQHYGGWEHRDVHNIYGLYVHMATADGLRQRSGGMERPFVLARAFFAGSQRFGAVWTGDNTAEWDHLKISIPMCLSLGLVGLSFCGADVGGFFKNPEPELLVRWYQMGAYQPFFRAHAHLDTGRREPWLLPSQHNDIIRDALGQRYSLLPFWYTLLYQAHREGIPVMRPLWVQYPQDVTTFNIDDQYLLGDALLVHPVSDSGAHGVQVYLPGQGEVWYDIQSYQKHHGPQTLYLPVTLSSIPVFQRGGTIVPRWMRVRRSSECMKDDPITLFVALSPQGTAQGELFLDDGHTFNYQTRQEFLLRRFSFSGNTLVSSSADPEGHFETPIWIERVVIIGAGKPAAVVLQTKGSPESRLSFQHDPETSVLVLRKPGINVASDWSIHLR

SEQ ID NO: 121 - protein, 966 aa, Mus musculus
MAAIAAVAARRRRSWLSLVLAYLGVCLGITLAVDRSNFKTCDESSFCKRQRSIRPGLSPYRALLDTLQLGPDALTVHLIHEVTKVLLVLELQGLQKNMTRIRIDELEPRRPRYRVPDVLVADPPTARLSVSGRDDNSVELTVAEGPYKIILTAQPFRLDLLEDRSLLLSVNARGLMAFEHQRAPRVPFSDKVSLALGSVWDKIKNLFSRQESKDPAEGNGAQPEATPGDGDKPEETQEKAEKDEPGAWEETFKTHSDSKPYGPTSVGLDFSLPGMEHVYGIPEHADSLRLKVTEGGEPYRLYNLDVFQYELNNPMALYGSVPVLLAHSFHRDLGIFWLNAAETWVDISSNTAGKTLFGKMLDYLQGSGETPQTDIRWMSESGIIDVFLMLGPSVFDVFRQYASLTGTQALPPLFSLGYHQSRWNYRDEADVLEVDQGFDDHNMPCDVIWLDIEHADGKRYFTWDPTRFPQPLNMLEHLASKRRKLVAIVDPHIKVDSGYRVHEELRNHGLYVKTRDGSDYEGWCWPGSASYPDFTNPRMRAWWSNMFSFDNYEGSAPNLYVWNDMNEPSVFNGPEVTMLKDAVHYGGWEHRDIHNIYGLYVHMATADGLIQRSGGIERPFVLSRAFFSGSQRFGAVWTGDNTAEWDHLKISIPMCLSLALVGLSFCGADVGGFFKNPEPELLVRWYQMGAYQPFFRAHAHLDTGRREPWLLASQYQDAIRDALFQRYSLLPFWYTLFYQAHKEGFPVMRPLWVQYPEDMSTFSIEDQFMLGDALLIHPVSDAGAHGVQVYLPGQEEVWYDIQSYQKHHGPQTLYLPVTLSSIPVFQRGGTIVPRWMRVRRSSDCMKDDPITLFVALSPQGTAQGELFLDDGHTFNYQTRHEFLLRRFSFSGSTLVSSSADPKGHLETPIWIERVVIMGAGKPAAVVLQTKGSPESRLSFQHDPETSVLILRKPGVSVASDWSIHLR

SEQ ID NO: 122 - protein, 944 aa, Homo sapiens
MAAVAAVAARRRRSWASLVLAFLGVCLGITLAVDRSNFKTCEESSFCKRQRSIRPGLSPYRALLDSLQLGPDSLTVHLIHEVTKVLLVLELQGLQKNMTRFRIDELEPRRPRYRVPDVLVADPPIARLSVSGRDENSVELTMAEGPYKIILTARPFRLDLLEDRSLLLSVNARGLLEFEHQRAPRVSQGSKDPAEGDGAQPEETPRDGDKPEETQGKAEKDEPGAWEETFKTHSDSKPYGPMSVGLDFSLPGMEHVYGIPEHADNLRLKVTEGGEPYRLYNLDVFQYELYNPMALYGSVPVLLAHNPHRDLGIFWLNAAETWVDISSNTAGKTLFGKMMDYLQGSGETPQTDVRWMSETGIIDVFLLLGPSISDVFRQYASLTGTQALPPLFSLGYHQSRWNYRDEADVLEVDQGFDDHNLPCDVIWLDIEHADGKRYFTWDPSRFPQPRTMLERLASKRRKLVAIVDPHIKVDSGYRVHEELRNLGLYVKTRDGSDYEGWCWPGSAGYPDFTNPTMRAWWANMFSYDNYEGSAPNLFVWNDMNEPSVFNGPEVTMLKDAQHYGGWEHRDVHNIYGLYVHMATADGLRQRSGGMERPFVLARAFFAGSQRFGAVWTGDNTAEWDHLKISIPMCLSLGLVGLSFCGADVGGFFKNPEPELLVRWYQMGAYQPFFRAHAHLDTGRREPWLLPSQHNDIIRDALGQRYSLLPFWYTLLYQAHREGIPVMRPLWVQYPQDVTTFNIDDQYLLGDALLVHPVSDSGAHGVQVYLPGQGEVWYDIQSYQKHHGPQTLYLPVTLSSIPVFQRGGTIVPRWMRVRRSSECMKDDPITLFVALSPQGTAQGELFLDDGYTFNYQTRQEFLLRRFSFSGNTLVSSSADPEGHFETPIWIERVVIIGAGKPAAVVLQTKGSPESRLSFQHDPETSVLVLRKPGINVASDWSIHLR

SEQ ID NO: 123 - protein, 943 aa, Homo sapiens
AAVAAVAARRRRSWASLVLAFLGVCLGITLAVDRSNFKTCEESSFCKRQRSIRPGLSPYRALLDSLQLGPDSLTVHLIHEVTKVLLVLELQGLQKNMTRFRIDELEPRRPRYRVPDVLVADPPIARLSVSGRDENSVELTMAEGPYKIILTARPFRLDLLEDRSLLLSVNARGLLEFEHQRAPRVSQGSKDPAEGDGAQPEETPRDGDKPEETQGKAEKDEPGAWEETFKTHSDSKPYGPMSVGLDFSLPGMEHVYGIPEHADNLRLKVTEGGEPYRLYNLDVFQYELYNPMALYGSVPVLLAHNPHRDLGIFWLNAAETWVDISSNTAGKTLFGKMMDYLQGSGETPQTDVRWMSETGIIDVFLLLGPSISDVFRQYASLTGTQALPPLFSLGYHQSRWNYRDEADVLEVDQGFDDHNLPCDVIWLDIEHADGKRYFTWDPSRFPQPRTMLERLASKRRKLVAIVDPHIKVDSGYRVHEELRNLGLYVKTRDGSDYEGWCWPGSAGYPDFTNPTMRAWWANMFSYDNYEGSAPNLFVWNDMNEPSVFNGPEVTMLKDAQHYGGWEHRDVHNIYGLYVHMATADGLRQRSGGMERPFVLARAFFAGSQRFGAVWTGDNTAEWDHLKISIPMCLSLGLVGLSFCGADVGGFFKNPEPELLVRWYQMGAYQPFFRAHAHLDTGRREPWLLPSQHNDIIRDALGQRYSLLPFWYTLLYQAHREGIPVMRPLWVQYPQDVTTFNIDDQYLLGDALLVHPVSDSGAHGVQVYLPGQGEVWYDIQSYQKHHGPQTLYLPVTLSSIPVFQRGGTIVPRWMRVRRSSECMKDDPITLFVALSPQGTAQGELFLDDGYTFNYQTRQEFLLRRFSFSGNTLVSSSADPEGHFETPIWIERVVIIGAGKPAAVVLQTKGSPESRLSFQHDPETSVLVLRKPGINVASDWSIHLR

SEQ ID NO: 124 - protein, 944 aa, Sus scrofa
MAAVAAVAARRRRSWTGLVLACLGVCLGLTLAVDRSNFKTCEESSFCKRQRSIRPGQSPYRALLDSLQLGPDTLTIHLINEVTKVLLVLELQGLQKNMTRIRIDELEPRRPRYRVPDVLVAEPPTARLSVSGQDDNSVEVTVAEGPYKIILTARPFRLDLLEDRSLLLSVNARGLLNFEHQRAPRVSQGSKDPAEGDGAQPEEAPGDGDKPEEIQGKAEKDEPGAWEETFKTHSDSKPYGPTSVGLDFSLPGMEHVYGIPEHADSLRLKVTEGGDPYRLYNLDVFQYELYNPMALYGSVPVLLAHSPHRDLGIFWLNAAETWVDISSNTAGKTLFGKMLDYLQGSGETPQTDVRWMSESGIIDVFLLLGPSVFDVFRQYASLTGTQALPPLFSLGYHQSRWNYRDEADVLEVNQGFDDHNLPCDFIWLDIEHADGKRYFTWDPSRFPQPRTMLEHLASKRRKLVAIVDPHIKVDSSYRVHEELQNLGLYVKTRDGSDYEGWCWPGAASYPDFTNPKMRAWWADMFRFENYEGSSSNLYVWNDMNEPSVFNGPEVTMLKDAQHYGGWEHRDLHNIYGFYVHMATADGLVLRSGGVERPFVLSRAFFAGSQRFGAVWTGDNTAEWDHLKISIPMCLSLGLVGVSFCGADVGGFFKNPEPELLVRWYQMGAYQPFFRAHAHLDTGRREPWLLPTQYQDMIRDALGQRYSLLPFWYTLFYQAHREGVPVMRALWVHYPQDVTTFSIDDEFLLGDALLVHPVTDSEAHGVQVYLPGQGEVWYDVHSYQKYHGPQTLYLPVTLSSIPVFQRGGTIVPRWMRVRRSSDCMKDDPITLFVALSPQGTAQGELFLDDGHTFNYQTGHEFLLRRFSFSGNTLVSSSADSKGHFETPVWIERVVIIGAGKPATVVLQTKGSPESRLSFQHDPETSVLILRKPGVNVASDWSIHLR

SEQ ID NO: 125 - protein, 707 aa, Artificial Sequence
  Description of Artificial Sequence: Glycosyl hydrolases family 31
PLDFPASSSPAESDLYDVLNSNGPFGFEVIRKSTGDVLFDTTFGPLVFSDQFLQLSTSLPSEYIYGLGEHAHKLFRRDTNETYTLWNRDVGPYSGDNNLYGSHPFYMSLEDSGNAHGVFLLNSNAMEVDIGPGPALTYRVIGGILDFYFFLGPTPEDVLQQYTELIGRPALPPYWSLGFHLCRWGYTNVSEVKTVVDGMRKANIPLDVQWLDIDYMDGYKDFTWDPVRFPGPEDFVKKLHAKGQKYVVILDPAISVDSASYYPYERGKEKGVFVKNPNGSDYIGEVWPGYTAFPDFTNPEARKWWADEIKDFHDSLPFDGIWIDMNEPSSFSEPGPNDSNLNYPPYAPNDGDGPLSSKTMCMDAVHYGGVEHYDVHNLYGLSEAKATYEALKKVTGGKRPFVLSRSTFAGSGRYAGHWTGDNTASWDDLKYSIPGVLSFNLFGIPFVGADICGFNGNTTEELCVRWMQLGAFYPFSRNHNHLGTIPQEPWLFDSVAAEASRKALNLRYTLLPYLYTLFHEAHVSGLPVMRPLFFEFPDDAETYDIDRQFLWGSALLVAPVLEPGATSVKAYLPGGRWYDLYTGAGEASRGGNVTLSAPLDKIPVHVRGGSIIPTQEPALTTTESRDNPFHLLVALDDNGTASGELYLDDGESIDTQRGDYLLVQFSANNNTLTGTEVVTGYYKNSTNLTLEKITILGVGNEPAAVNF

SEQ ID NO: 126 - protein, 2828 aa, Homo sapiens
MPKRAHWGALSVVLILLWGHPRVALACPHPCACYVPSEVHCTFRSLASVPAGIARHVERINLGFNSIQALSETSFAGLTKLELLMIHGNEIPSIPDGALRDLSSLQVFKFSYNKLRVITGQTLQGLSNLMRLHIDHNKIEFIHPQAFNGLTSLRLLHLEGNLLHQLHPSTFSTFTFLDYFRLSTIRHLYLAENMVRTLPASMLRNMPLLENLYLQGNPWTCDCEMRWFLEWDAKSRGILKCKKDKAYEGGQLCAMCFSPKKLYKHEIHKLKDMTCLKPSIESPLRQNRSRSIEEEQEQEEDGGSQLILEKFQLPQWSISLNMTDEHGNMVNLVCDIKKPMDVYKIHLNQTDPPDIDINATVALDFECPMTRENYEKLWKLIAYYSEVPVKLHRELMLSKDPRVSYQYRQDADEEALYYTGVRAQILAEPEWVMQPSIDIQLNRRQSTAKKVLLSYYTQYSQTISTKDTRQARGRSWVMIEPSGAVQRDQTVLEGGPCQLSCNVKASESPSIFWVLPDGSILKAPMDDPDSKFSILSSGWLRIKSMEPSDSGLYQCIAQVRDEMDRMVYRVLVQSPSTQPAEKDTVTIGKNPGESVTLPCNALAIPEAHLSWILPNRRIINDLANTSHVYMLPNGTLSIPKVQVSDSGYYRCVAVNQQGADHFTVGITVTKKGSGLPSKRGRRPGAKALSRVREDIVEDEGGSGMGDEENTSRRLLHPKDQEVFLKTKDDAINGDKKAKKGRRKLKLWKHSEKEPETNVAEGRRVFESRRRINMANKQINPERWADILAKVRGKNLPKGTEVPPLIKTTSPPSLSLEVTPPFPAVSPPSASPVQTVTSAEESSADVPLLGEEEHVLGTISSASMGLEHNHNGVILVEPEVTSTPLEEVVDDLSEKTEEITSTEGDLKGTAAPTLISEPYEPSPTLHTLDTVYEKPTHEETATEGWSAADVGSSPEPTSSEYEPPLDAVSLAESEPMQYFDPDLETKSQPDEDKMKEDTFAHLTPTPTIWVNDSSTSQLFEDSTIGEPGVPGQSHLQGLTDNIHLVKSSLSTQDTLLIKKGMKEMSQTLQGGNMLEGDPTHSRSSESEGQESKSITLPDSTLGIMSSMSPVKKPAETTVGTLLDKDTTTVTTTPRQKVAPSSTMSTHPSRRRPNGRRRLRPNKFRHRHKQTPPTTFAPSETFSTQPTQAPDIKISSQVESSLVPTAWVDNTVNTPKQLEMEKNAEPTSKGTPRRKHGKRPNKHRYTPSTVSSRASGSKPSPSPENKHRNIVTPSSETILLPRTVSLKTEGPYDSLDYMTTTRKIYSSYPKVQETLPVTYKPTSDGKEIKDDVATNVDKHKSDILVTGESITNAIPTSRSLVSTMGEFKEESSPVGFPGTPTWNPSRTAQPGRLQTDIPVTTSGENLTDPPLLKELEDVDFTSEFLSSLTVSTPFHQEEAGSSTTLSSIKVEVASSQAETTTLDQDHLETTVAILLSETRPQNHTPTAARMKEPASSSPSTILMSLGQTTTTKPALPSPRISQASRDSKENVFLNYVGNPETEATPVNNEGTQHMSGPNELSTPSSDRDAFNLSTKLELEKQVFGSRSLPRGPDSQRQDGRVHASHQLTRVPAKPILPTATVRLPEMSTQSASRYFVTSQSPRHWTNKPEITTYPSGALPENKQFTTPRLSSTTIPLPLHMSKPSIPSKFTDRRTDQFNGYSKVFGNNNIPEARNPVGKPPSPRIPHYSNGRLPFFTNKTLSFPQLGVTRRPQIPTSPAPVMRERKVIPGSYNRIHSHSTFHLDFGPPAPPLLHTPQTTGSPSTNLQNIPMVSSTQSSISFITSSVQSSGSFHQSSSKFFAGGPPASKFWSLGEKPQILTKSPQTVSVTAETDTVFPCEATGKPKPFVTWTKVSTGALMTPNTRIQRFEVLKNGTLVIRKVQVQDRGQYMCTASNLHGLDRMVVLLSVTVQQPQILASHYQDVTVYLGDTIAMECLAKGTPAPQISWIFPDRRVWQTVSPVESRITLHENRTLSIKEASFSDRGVYKCVASNAAGADSLAIRLHVAALPPVIHQEKLENISLPPGLSIHIHCTAKAAPLPSVRWVLGDGTQIRPSQFLHGNLFVFPNGTLYIRNLAPKDSGRYECVAANLVGSARRTVQLNVQRAAANARITGTSPRRTDVRYGGTLKLDCSASGDPWPRILWRLPSKRMIDALFSFDSRIKVFANGTLVVKSVTDKDAGDYLCVARNKVGDDYVVLKVDVVMKPAKIEHKEENDHKVFYGGDLKVDCVATGLPNPEISWSLPDGSLVNSFMQSDDSGGRTKRYVVFNNGTLYFNEVGMREEGDYTCFAENQVGKDEMRVRVKVVTAPATIRNKTYLAVQVPYGDVVTVACEAKGEPMPKVTWLSPTNKVIPTSSEKYQIYQDGTLLIQKAQRSDSGNYTCLVRNSAGEDRKTVWIHVNVQPPKINGNPNPITTVREIAAGGSRKLIDCKAEGIPTPRVLWAFPEGVVLPAPYYGNRITVHGNGSLDIRSLRKSDSVQLVCMARNEGGEARLIVQLTVLEPMEKPIFHDPISEKITAMAGHTISLNCSAAGTPTPSLVWVLPNGTDLQSGQQLQRFYHKADGMLHISGLSSVDAGAYRCVARNAAGHTERLVSLKVGLKPEANKQYHNLVSIINGETLKLPCTPPGAGQGRFSWTLPNGMHLEGPQTLGRVSLLDNGTLTVREASVFDRGTYVCRMETEYGPSVTSIPVIVIAYPPRITSEPTPVIYTRPGNTVKLNCMAMGIPKADITWELPDKSHLKAGVQARLYGNRFLHPQGSLTIQHATQRDAGFYKCMAKNILGSDSKTTYIHVF

SEQ ID NO: 127 - protein, 3645 aa, Homo sapiens
MRGHQLSWSYRVILQSASSWAPSISGSNNMVAVVVNNPVRLECEARGIPAPSLTWLKDGSPVSSFSNGLQVLSGGRILALTSAQISDTGRYTCVAVNAAGEKQRDIDLRVYVPPNIMGEEQNVSVLISQAVELLCQSDAIPPPTLTWLKDGHPLLKKPGLSISENRSVLKIEDAQVQDTGRYTCEATNVAGKTEKNYNVNIWVPPNIGGSDELTQLTVIEGNLISLLCESSGIPPPNLIWKKKGSPVLTDSMGRVRILSGGRQLQISIAEKSDAALYSCVASNVAGTAKKEYNLQVYIRPTITNSGSHPTEIIVTRGKSISLECEVQGIPPPTVTWMKDGHPLIKAKGVEILDEGHILQLKNIHVSDTGRYVCVAVNVAGMTDKKYDLSVHAPPSIIGNHRSPENISVVEKNSVSLTCEASGIPLPSITWFKDGWPVSLSNSVRILSGGRMLRLMQTTMEDAGQYTCVVRNAAGEERKIFGLSVLVPPHIVGENTLEDVKVKEKQSVTLTCEVTGNPVPEITWHKDGQPLQEDEAHHIISGGRFLQITNVQVPHTGRYTCLASSPAGHKSRSFSLNVFVSPTIAGVGSDGNPEDVTVILNSPTSLVCEAYSYPPATITWFKDGTPLESNRNIRILPGGRTLQILNAQEDNAGRYSCVATNEAGEMIKHYEVKVYIPPIINKGDLWGPGLSPKEVKIKVNNTLTLECEAYAIPSASLSWYKDGQPLKSDDHVNIAANGHTLQIKEAQISDTGRYTCVASNIAGEDELDFDVNIQVPPSFQKLWEIGNMLDTGRNGEAKDVIINNPISLYCETNAAPPPTLTWYKDGHPLTSSDKVLILPGGRVLQIPRAKVEDAGRYTCVAVNEAGEDSLQYDVRVLVPPIIKGANSDLPEEVTVLVNKSALIECLSSGSPAPRNSWQKDGQPLLEDDHHKFLSNGRILQILNTQITDIGRYVCVAENTAGSAKKYFNLNVHVPPSVIGPKSENLTVVVNNFISLTCEVSGFPPPDLSWLKNEQPIKLNTNTLIVPGGRTLQIIRAKVSDGGEYTCIAINQAGESKKKFSLTVYVPPSIKDHDSESLSVVNVREGTSVSLECESNAVPPPVITWYKNGRMITESTHVEILADGQMLHIKKAEVSDTGQYVCRAINVAGRDDKNFHLNVYVPPSIEGPEREVIVETISNPVTLTCDATGIPPPTIAWLKNHKRIENSDSLEVRILSGGSKLQIARSQHSDSGNYTCIASNMEGKAQKYYFLSIQVPPSVAGAEIPSDVSVLLGENVELVCNANGIPTPLIQWLKDGKPIASGETERIRVSANGSTLNIYGALTSDTGKYTCVATNPAGEEDRIFNLNVYVTPTIRGNKDEAEKLMTLVDTSINIECRATGTPPPQINWLKNGLPLPLSSHIRLLAAGQVIRIVRAQVSDVAVYTCVASNRAGVDNKHYNLQVFAPPNMDNSMGTEEITVLKGSSTSMACITDGTPAPSMAWLRDGQPLGLDAHLTVSTHGMVLQLLKAETEDSGKYTCIASNEAGEVSKHFILKVLEPPHINGSEEHEEISVIVNNPLELTCIASGIPAPKMTWMKDGRPLPQTDQVQTLGGGEVLRISTAQVEDTGRYTCLASSPAGDDDKEYLVRVHVPPNIAGTDEPRDITVLRNRQVTLECKSDAVPPPVITWLRNGERLQATPRVRILSGGRYLQINNADLGDTANYTCVASNIAGKTTREFILTVNVPPNIKGGPQSLVILLNKSTVLECIAEGVPTPRITWRKDGAVLAGNHARYSILENGFLHIQSAHVTDTGRYLCMATNAAGTDRRRIDLQVHVPPSIAPGPTNMTVIVNVQTTLACEATGIPKPSINWRKNGHLLNVDQNQNSYRLLSSGSLVIISPSVDDTATYECTVTNGAGDDKRTVDLTVQVPPSIADEPTDFLVTKHAPAVITCTASGVPFPSIHWTKNGIRLLPRGDGYRILSSGAIEILATQLNHAGRYTCVARNAAGSAHRHVTLHVHEPPVIQPQPSELHVILNNPILLPCEATGTPSPFITWQKEGINVNTSGRNHAVLPSGGLQISRAVREDAGTYMCVAQNPAGTALGKIKLNVQVPPVISPHLKEYVIAVDKPITLSCEADGLPPPDITWHKDGRAIVESIRQRVLSSGSLQIAFVQPGDAGHYTCMAANVAGSSSTSTKLTVHVPPRIRSTEGHYTVNENSQAILPCVADGIPTPAINWKKDNVLLANLLGKYTAEPYGELILENVVLEDSGFYTCVANNAAGEDTHTVSLTVHVLPTFTELPGDVSLNKGEQLRLSCKATGIPLPKLTWTFNNNIIPAHFDSVNGHSELVIERVSKEDSGTYVCTAENSVGFVKAIGFVYVKEPPVFKGDYPSNWIEPLGGNAILNCEVKGDPTPTIQWNRKGVDIEISHRIRQLGNGSLAIYGTVNEDAGDYTCVATNEAGVVERSMSLTLQSPPIITLEPVETVINAGGKIILNCQATGEPQPTITWSRQGHSISWDDRVNVLSNNSLYIADAQKEDTSEFECVARNLMGSVLVRVPVIVQVHGGFSQWSAWRACSVTCGKGIQKRSRLCNQPLPANGGKPCQGSDLEMRNCQNKPCPVDGSWSEWSLWEECTRSCGRGNQTRTRTCNNPSVQHGGRPCEGNAVEIIMCNIRPCPVHGAWSAWQPWGTCSESCGKGTQTRARLCNNPPPAFGGSYCDGAETQMQVCNERNCPVHGKWATWASWSACSVSCGGGARQRTRGCSDPVPQYGGRKCEGSDVQSDFCNSDPCPTHGNWSPWSGWGTCSRTCNGGQMRRYRTCDNPPPSNGGRACGGPDSQIQRCNTDMCPVDGSWGSWHSWSQCSASCGGGEKTRKRLCDHPVPVKGGRPCPGDTTQVTRCNVQACPGGPQRARGSVIGNINDVEFGIAFLNATITDSPNSDTRIIRAKITNVPRSLGSAMRKIVSILNPIYWTTAKEIGEAVNGFTLTNAVFKRETQVEFATGEILQMSHIARGLDSDGSLLLDIVVSGYVLQLQSPAEVTVKDYTEDYIQTGPGQLYAYSTRLFTIDGISIPYTWNHTVFYDQAQGRMPFLVETLHASSVESDYNQIEETLGFKIHASISKGDRSNQCPSGFTLDSVGPFCADEDECAAGNPCSHSCHNAMGTYYCSCPKGLTIAADGRTCQDIDECALGRHTCHAGQDCDNTIGSYRCVVRCGSGFRRTSDGLSCQDINECQESSPCHQRCFNAIGSFHCGCEPGYQLKGRKCMDVNECRQNVCRPDQHCKNTRGGYKCIDLCPNGMTKAENGTCIDIDECKDGTHQCRYNQICENTRGSYRCVCPRGYRSQGVGRPCMDINECEQVPKPCAHQCSNTPGSFKCICPPGQHLLGDGKSCAGLERLPNYGTQYSSYNLARFSPVRNNYQPQQHYRQYSHLYSSYSEYRNSRTSLSRTRRTIRKTCPEGSEASHDTCVDIDECENTDACQHECKNTFGSYQCICPPGYQLTHNGKTCQDIDECLEQNVHCGPNRMCFNMRGSYQCIDTPCPPNYQRDPVSGFCLKNCPPNDLECALSPYALEYKLVSLPFGIATNQDLIRLVAYTQDGVMHPRTTFLMVDEEQTVPFALRDENLKGVVYTTRPLREAETYRMRVRASSYSANGTIEYQTTFIVYIAVSAYPY

SEQ ID NO: 128 - protein, 5636 aa, Homo sapiens
  VARIANT (3003): Wherein Xaa is any amino acid.
  VARIANT (3041): Wherein Xaa is any amino acid.
  VARIANT (3367): Wherein Xaa is any amino acid.
MISWEVVHTVFLFALLYSSLAQDASPQSEIRAEEFPEGASTLAFVFDVTGSMYDDLVQVIEGASKILETSLKRPKRPLFNFALVPFHDPEIGPVTITTDPKKFQYELRELYVQGGGDCPEMSIGAIKIALEISLPGSFIYVFTDARSKDYRLTHEVLQLIQQKQSQVVFVLTGDCDDRTHIGYKVYEEIASTSSGQVFHLDKKQVNEVLKWVEEAVQASKVHLLSTDHLEQAVNTWRIPFDPSLKEVTVSLSGPSPMIEIRNPLGKLIKKGFGLHELLNIHNSAKVVNVKEPEAGMWTVKTSSSGRHSVRITGLSTIDFRAGFSRKPTLDFKKTVSRPVQGIPTYVLLNTSGISTPARIDLLELLSISGSSLKTIPVKYYPHRKPYGIWNISDFVPPNEAFFLKVTGYDKDDYLFQRVSSVSFSSIVPDAPKVTMPEKTPGYYLQPGQIPCSVDSLLPFTLSFVRNGVTLGVDQYLKESASVSLDIAKVTLSDEGFYECIAVSSAGTGRAQTFFDVSEPPPVIQVPNNVTVTPGERAVLTCLIISAVDYNLTWQRNDRDVRLAEPARIRTLANLSLELKSVKFNDAGEYHCMVSSEGGSSAASVFLTVQEPPKVTVMPKNQSFTGGSEVSIMCSATGYPKPKIAWTVNDMFIVGSHRYRMTSDGTLFIKNAAPKDAGIYGCLASNSAGTDKQNSTLRYIEAPKLMVVQSELLVALGDITVMECKTSGIPPPQVKWFKGDLELRPSTFLIIDPLLGLLKIQETQDLDAGDYTCVAINEAGRATGKITLDVGSPPVFIQEPADVSMEIGSNVTLPCYVQGYPEPTIKWRRLDNMPIFSRPFSVSSISQLRTGALFILNLWASDKGTYICEAENQFGKIQSETTVTVTGLVAPLIGISPSVANVIEGQQLTLPCTLLAGNPIPERRWIKNSAMLLQNPYITVRSDGSLHIERVQLQDGGEYTCVASNVAGTNNKTTSVVVHVLPTIQHGQQILSTIEGIPVTLPCKASGNPKPSVIWSKKGELISTSSAKFSAGADGSLYVVSPEGEESGEYVCTATNTAGYAKRKVQLTVYVRPRVFGDLRGLSQDKPVEISVLAGEEVTLPCEVKSLPPPIITWAKETQLISPFSPRHTFLPSGSMKITETRTSDSGMYLCVATNIAGNVTQAVKLNVHVPPKIQRGPKHLKVQVGQRVDIPCNAQGTPLPVITWSKGGSTMLVDGEHHVSNPDGTLSIDQATPSDAGIYTCVATNIAGTDETEITLHVQEPPTVEDLEPPYNTTFQERVANQRIEFPCPAKGTPKPTIKWLHNGRELTGREPGISILEEGTLLVIASVTPYDNGEYICVAVNEAGTTERKYNLKVHVPPVIKDKEQVSNVSVLLNQLTNLFCEVEGTPSPIIMWYKDNVQVTESSTIQTVNNGKILKLFRATPEDAGRYSCKAINIAGTSQKYFNIDVLVPPTIIGTNFPKEVSVVLNRDVALECQVKGTPFPDIHWFKDGKPLFLGDPNVELLDRGQVLHLKNARRNDKGRYQCTVSNAAGKQAKDIKLTIYIPPSIKGGNVTTDISVLINSLIKLECKTRGLPMPAITWYKDGQPIMSSSQALYIDKGQYLHIPRAQVSDSATYTCHVANVAGTAEKSFHVDVYVPPMIEGNLATPLNKQVVIAHSLTLECNAAGNPSPILTWLKDGVPVKANDNFRIEAGGKKLEIMSAQEIDRGQYICVATSVAGEKEIKYEVDVLVPPAIEGGDETSYFIVMVNNLLELDCHVTGSPPPTIMWLKDGQLIDERDGFKILLNGRKLVIAQAQVSNTGLYRCMAANTAGDHKKEFEVTVHVPPTIKSSGLSERVVVKYKPVALQCIANGIPNPSITWLKDDQPVNTAQGNLKIQSSGRVLQIAKTLLEDAGRYTCVATNAAGETQQHIQLHVHEPPSLEDAGKMLNETVLVSNPVQLECKAAGNPVPVITWYKDNCLLSGSTSMTFLNRGQIIDIESAQISDAGIYKCVAINSAGATELFYSLQVHVAPSISGSNNMVAVVVNNPVRLECEARGIPAPSLTWLKDGSPVSSFSNGLQVLSGGRILALTSTQISDTGRYTCVAVNAAGEKQRDIDLRVYVPPNIMGEEQNVSVLISQAVELLCQSDAIPPPTLTWLKDGHPLLKKPGLSISENRSVLKIEDAQVQDTGRYTCEATNVAGKTEKKNYNVNIWVPPNIGGSDELTQLTVIEGNLISLLCESSGIPPPNLIWKKKGSPVLTDSMGRVRILSGGRQLQISIAEKSDAALYSCVASNVAGTAKKEYNLQVYIRPTITNSGSHPTEIIVTRGKSISLECEVQGIPPPTVTWMKDGHPLIKAKGVEILDEGHILQLKNIHVSDTGRYVCVAVNVAGMTDKKYDLSVHAPPSIIGNHRSPENISVVEKNSVSLTCEASGIPLPSTTWFKDGWPVSLSNSVRILSGGRMLRLMQTTMEDAGQYTCVVRNAAGEERKIFGLSVLVPPHIVGENTLEDVKVKEKQSVTLTCEVTGNPVPEITWHKDGQPLQEDEAHHIISGGRFLQITNVQVPHTGRYTCLASSPAGHKSRSFSLNVFVSPTIAGVGSDGNPEDVTVILNSPTSLVCEAYSYPPATITWFKDGTPLESNRNIRILPGGRTLQILNAQEDNAGRYSCVATNEAGEMIKHYEVKVYIPPIINKGDLWGPGLSPKEVKIKVNNTLTLECEAYAIPSASLSWYKDGQPLKSDDHVNIAANGHTLQIKEAQISDTGRYTCVASNIAGEDELDFDVNIQVPPSFQKLWEIGNMLDTGRNGEAKDVIINNPISLYCETNAAPPPTLTWYKDGHPLTSSDKVLILPGGRVLQIPRAKVEDAGRYTCVAVNEAGEDSLQYDVRVLVPPIIEGANSDLPEEVTVLVNKSALIECLSSGSPAPRNSWQKDGQPLLEDDHHKFLSNGRILQILNTQITDIGRYVCVAENTAGSAKKYFNLNVHVPPSVIGPKSENLTVVVNNFISLTCEVSGFPPPDLSWLKNXQPIKLNTNTLIVPGGRTLQIIRAKVSDGGEYTCIAINXAGESKKKFSLTVYVPPSIKDHDSESLSVVNVREGTSVSLECESNAVPPPVITWYKNGRMITESTHVEILADGQMLHIKKAEVSDTGQYVCRAINVAGRDDKNFHLNVYVPPSIEGPEREVIVETISNPVTLTCDATGIPPPTIAWLKNYKRIENSDSLEVRILSGGSKLQIARSQHSDSGNYTCIASNMEGKAQKYYFLSIQVPPSVAGAEIPSDVSVLLGENVELVCNANGIPTPLIQWLKDGKPIASGETERIRVSANGSTLNIYGALTSDTGKYTCVATNPAGEEDRIFNLNVYVTPTIRGNKDEAEKLMTYVDTSINIECRXTGTPPPQINWLKNGLPLPLSSHIRLLAAGQVIRIVRAQVSDVAVYTCVASNRAGVDNKHYNLQVFAPPNMDNSMGTEEITVLKGSSTSMACITDGTPAPSMAWLRDGQPLGLDAHLTVSTHGMVLQLLKAETEDSGKYTCIASNEAGEVSKHFILKVLEPPHINGSEEHEEISVIVNNPLELTCIASGIPAPKMTWMKDGRPLPQTDQVQTLGGGEVLRISTAQVEDTGRYTCLASSPAGDDDKEYLVRVHVPPNIAGTDEPRDITVLRNRQVTLECKSDAVPPPVITWLRNGERLQATPRVRILSGGRYLQINNADLGDTANYTCVASNIAGKTTREFILTVNVPPNIKGGPQSLVILLNKSTVLECIAEGVPTPRITWRKDGAVLAGNHARYSILENGFLHIQSAHVTDTGRYLCMATNAAGTDRRRIDLQVHVPPSIAPGPTNMTVIVNVQTTLACEATGIPKPSINWRKNGHLLNVDQNQNSYRLLSSGSLVIISPSVDDTATYECTVTNGAGDDKRTVDLTVQVPPSIADEPTDFLVTKHAPAVITCTASGVPFPSIHWTKNGIRLLPRGDGYRILSSGAIEILATQLNHAGRYTCVARNAAGSAHRHVTLHVHEPPVIQPQPSELHVILNNPILLPCEATGTPSPFITWQKEGINVNTSGRNHAVLPSGGLQISRAVREDAGTYMCVAQNPAGTALGKIKLNVQVPPVISPHLKEYVIAVDKPITLSCEADGLPPPDITWHKDGRAIVESIRQRVLSSGSLQIAFVQPGDAGHYTCMAANVAGSSSTSTKLTVHVPPRIRSTEGHYTVNENSQAILPCVADGIPTPAINWKKDNVLLANLLGKYTAEPYGELILENVVLEDSGFYTCVANNAAGEDTHTVSLTVHVLPTFTELPGDVSLNKGEQLRLSCKATGIPLPKLTWTFNNNIIPAHFDSVNGHSELVIERVSKEDSGTYVCTAENSVGFVKATGFVYVKEPPVFKGDYPSNWIEPLGGNAILNCEVKGDPTPTIQWNRKGVDIEISHRIRQLGNGSLAIYGTVNEDAGDYTCVATNEAGVVERSMSLTLQSPPIITLEPVETVINAGGKIILNCQATGEPQPTITWSRQGHSISWDDRVNVLSNNSLYIADAQKEDTSEFECVARNLMGSVLVRVPVIVQVHGGFSQWSAWRACSVTCGKGIQKRSRLCNQPLPANGGKPCQGSDLEMRNCQNKPCPVDGSWSEWSLWEECTRSCGRGNQTRTRTCNNPSVQHGGRPCEGNAVEIIMCNIRPCPVHGAWSAWQPWGTCSESCGKGTQTRARLCNNPPPAFGGSYCDGAETQMQVCNERNCPIHGKWATWASWSACSVSCGGGARQRTRGCSDPVPQYGGRKCEGSDVQSDFCNSDPCPTHGNWSPWSGWGTCSRTCNGGQMRRYRTCDNPPPSNGGRACGGPDSQIQRCNTDMCPVDGSWGSWHSWSQCSASCGGGEKTRKRLCDHPVPVKGGRPCPGDTTQVTRCNVQACPGGPQRARGSVIGNINDVEFGIAFLNATITDSPNSDTRIIRAKITNVPRSLGSAMRKIVSILNPIYWTTAKEIGEAVNGFTLTNAVFKRETQVEFATGEILQMSHIARGLDSDGSLLLDIVVSGYVLQLQSPAEVTVKDYTEDYIQTGPGQLYAYSTRLFTIDGISIPYTWNHTVFYDQAQGRMPFLVETLHASSVESDYNQIEETLGFKIHASISKGDRSNQCPSGFTLDSVGPFCADEDECAAGNPCSHSCHNAMGTYYCSCPKGLTIAADGRTCQDIDECALGRHTCHAGQDCDNTIGSYRCVVRCGSGFRRTSDGLSCQDINECQESSPCHQRCFNAIGSFHCGCEPGYQLKGRKCMDVNECRQNVCRPDQHCKNTRGGYKCIDLCPNGMTKAENGTCIDIDECKDGTHQCRYNQICENTRSSYRCVCPRGYRSQGVGRPCMDIDECEQVPKPCAHQCSNTPGSFKCICPPGQHLLGDGKSCAGLERLPNYGTQYSSYNLARFSPVRNNYQPQQHYRQYSHLYSSYSEYRNSRTSLSRTRRTIRKTCPEGSEASHDTCVDIDECENTDACQHECKNTFGSYQCICPPGYQLTHNGKTCQDIDECLEQNVHCGPNRMCFNMRGSYQCIDTPCPPNYQRDPVSGFCLKNCPPNDLECALSPYALEYKLVSLPFGIATNQDLIRLVAYTQDGVMHPRTTFLMVDEEQTVPFALRDENLKGVVYTTRPLREAETYRMRVRASSYSANGTIEYQTTFIVYIAVSAYPY

SEQ ID NO: 129 - protein, 86 aa, Artificial Sequence
  Description of Artificial Sequence: IG Domain Consensus Sequence
PPSVTVKEGESVTLSCEASGNPPPTVTWYKQGGKLLAESGRFSVSRSGGNSTLTISNVTPEDSGTYTCAATNSSGSASSGTTLTVL

SEQ ID NO: 130 - protein, 63 aa, Artificial Sequence; identical to SEQ ID NO: 100
  Description of Artificial Sequence: IGc2 Domain Consensus Sequence

SEQ ID NO: 131 - protein, 51 aa, Artificial Sequence
  Description of Artificial Sequence: LRRCT Domain Consensus Sequence
NPFICDCELRWLLRWLREPRRLEDPEDLRCASPESLRGPLLELLPSDFSCP

SEQ ID NO: 132 - protein, 68 aa, Artificial Sequence; identical to SEQ ID NO: 101
  Description of Artificial Sequence: IG Domain Consensus Sequence

SEQ ID NO: 133 - protein, 1161 aa, Homo sapiens
MARIPRCDFLRPPGIYYLITSLLAGLFLPPAIAFNLDVMGAIRKEGEPGSLFGFSVALHRQLQPRPQSWLLVGAPQALALPGQQANRTGGLFACPLSLEETDCYRVDIDRGANVQKESKENQWLGVSVRSQGPGGKIVTCAHRYESRQRVDQALETRDVIGRCFVLSQDLAIRDELDGGEWKFCEGRPQGHEQFGFCQQGTAATFSPDSHYLVFGAPGTYNWKGTARVELCAQGSPDLAHLDDGPYEAGGEKEQDPRLIPVPANSYLGLLFVTNIDSSDPDQLVYKTLDPADRLTGPAGDLTLNSYLGFSIDSGKGLMRSEELSFVAGAPRANHKGAVVILRKDSASRLIPEVVLSGERLTSGFGYSLAVTDLNNDGWADLIVGAPYFFERQEELGGAVYVYMNQGGHWADISPLRICGSPDSMFGISLAVLGDLNQDGFPDIAVGAPFDGDGKVFIYHGSSLGVVVKPSQVLEGEAVGIKSFGYSLSGGLDVDGNHYPDLLVGSLADTAALFRARPVLHVSQEIFIDPRAIDLEQPNCADGRLVCVDIKICFSYVAVPSSYSPSVALDYMLDGDTDRRLRGQVPRVTFLSRGLDDLRHQSSGTVWLKHQHDRVCGDTVFQLQENVKDKLRAIVVTLSYGLRTPPLGRQAPGQELPTVAPILNAHQPSTQRTEIHFLKQGCGQDKICQSNLQLERYQFCSRISDTEFQALPMDLDGRTALFALSGQPFIGLELTVTNLPSDPSRPQADGDDAHEAQLLVTLPASLRYSGVRALDSVEKPLCLSNDSASHVECELGNPMKRGAQVTFYLILSTSGITIETTELEVKLLLATISEQELDPVSVRAHVFIELPLSISGVATPQQLFFSGEVKGESAMRSERDVGSKVKYEVTVSNQGQSLNTLGSAFLNIMWPHEIANGKWLLYPMRVELEGGQGPGKRGICSPRPNILQLDVDSRDRRRRELGQPEPQEPPEKVEPSTSWWPVSSAEKRNVTLDCAQGTAKCVVFSCPLYSFDRAAVLHVWGRLWNSTFLEEYMAVKSLEVIVRANITVKSSIKNLLLRDASTVIPVMVYLDPMAVVVEGVPWWVILLAVLAGLLVLALLVLLLWKCGFFRRNSPSSSFPTNYHRAHLAVQPSAMEAGGPGTVGWDSSSGRSTPRPPCPSTTQ

SEQ ID NO: 134 - protein, 1181 aa, Homo sapiens [sequence omitted]

SEQ ID NO: 135 - protein, 1137 aa, Homo sapiens [sequence omitted]

SEQ ID NO: 136 - protein, 1137 aa, Homo sapiens
MAGARSRDPWGASGICYLFGSLLVELLFSRAVAFNLDVMGALRKEGEPGSLFGFSVALHRQLQPRPQSWLLVGAPQALALPGQQANRTGGLFACPLSLEETDCYRVDIDQGADMQKESKENQWLGVSVRSQGPGGKIVTCAHRYEARQRVDQILETRDMIGRCFVLSQDLAIRDELDGGEWKFCEGRPQGHEQFGFCQQGTAAAFSPDSHYLLFGAPGTYNWKGLLFVTNIDSSDPDQLVYKTLDPADRLPGPAGDLALNSYLGFSIDSGKGLVRAEELSFVAGAPRANHKGAVVILRKDSASRLVPEVMLSGERLTSGFGYSLAVADLNSDGWPDLIVGAPYFFERQEELGGAVYVYLNQGGHWAGISPLRLCGSPDSMFGISLAVLGDLNQDGFPDIAVGAPFDGDGKVFIYHGSSLGVVAKPSQVLEGEAVGIKSFGYSLSGSLDMDGNQYPDLLVGSLADTAVLFRARPILHVSHEVSIAPRSIDLEQPNCAGGHSVCVDLRVCFSYIAVPSSYSPTVALDYVLDADTDRRLRGQVPRVTFLSRNLEEPKHQASGTVWLKHQHDRVCGDAMFQLQENVKDKLRAIVVTLSYSLQTPRLRRQAPGQGLPPVAPILNAHQPSTQRAEIHFLKQGCGEDKICQSNLQLVHARFCTRVSDTEFQPLPMDVDGTTALFALSGQPVIGLELMVTNLPSDPAQPQADGDDAHEAQLLVMLPDSLHYSGVRALDPAEKPLCLSNENASHVECELGNPMKRGAQVTFYLILSTSGISIETTELEVELLLATISEQELHPVSARARVFIELPLSIAGMAIPQQLFFSGVVRGERAMQSERDVGSKVKYEVTVSNQGQSLRTLGSAFLNIMWPHEIANGKWLLYPMQVELEGGQGPGQKGLCSPRPNILHLDVDSRDRRRRELEPPEQQEPGERQEPSMSWWPVSSAEKKKNITLDCARGTANCVVFSCPLYSFDRAAVLHVWGRLWNSTFLEEYSAVKSLEVIVRANITVKSSIKNLMLRDASTVIPVMVYLDPMAVVAEGVPWWVILLAVLAGLLVLALLVLLLWKMGFFKRAKHPEATVPQYHAVKIPREDRQQFKEEKTGTILRNNWGSPRREGPDAHPILAADGHPELGPDGHPGPGTA

SEQ ID NO: 137 - protein, 1141 aa, Homo sapiens [sequence omitted]

SEQ ID NO: 138 - DNA, 24 bp, Artificial Sequence
  Description of Artificial Sequence: NOV3a Primer 1
agcacgcacttgcccagagctatc

SEQ ID NO: 139 - DNA, 21 bp, Artificial Sequence
  Description of Artificial Sequence: NOV3a Primer 2
cctatggctgaaggcggaggt

SEQ ID NO: 140 - DNA, 18 bp, Artificial Sequence
  Description of Artificial Sequence: NOV3b Primer 1
ctgggtctcccctcccac

SEQ ID NO: 141 - DNA, 21 bp, Artificial Sequence
  Description of Artificial Sequence: NOV3b Primer 2
gtttattctgagcaccgggaa

SEQ ID NO: 142 - DNA, 24 bp, Artificial Sequence
  Description of Artificial Sequence: NOV4a Primer 1
agcacgcacttgcccagagctatc

SEQ ID NO: 143 - DNA, 26 bp, Artificial Sequence
  Description of Artificial Sequence: NOV4a Priomer 2
catttgctgtctcctctgctcaccag

SEQ ID NO: 144 - DNA, 25 bp, Artificial Sequence
  Description of Artificial Sequence: NOV4b Primer 1
atgacgcccgatctgctcaacttca

SEQ ID NO: 145 - DNA, 21 bp, Artificial Sequence
  Description of Artificial Sequence: NOV4b Primer 2
gtccagggagtcccgggtgtg

SEQ ID NO: 146 - DNA, 22 bp, Artificial Sequence
  Description of Artificial Sequence: NOV5 Primer 1
gcttctccgagcccgaatactc

SEQ ID NO: 147 - DNA, 22 bp, Artificial Sequence
  Description of Artificial Sequence: NOV5 Primer 2
ctcgaggccattcaggagttgt

SEQ ID NO: 148 - DNA, 22 bp, Artificial Sequence
  Description of Artificial Sequence: NOV6a Primer 1
gtttggggatgtggtccttgct

SEQ ID NO: 149 - DNA, 19 bp, Artificial Sequence
  Description of Artificial Sequence: NOV6a Primer 2
ctcacctgcggtgcggtag

SEQ ID NO: 150 - DNA, 22 bp, Artificial Sequence
  Description of Artificial Sequence: NOV6b Primer 1
gtttggggatgtggtccttgct

SEQ ID NO: 151 - DNA, 19 bp, Artificial Sequence
  Description of Artificial Sequence: NOV6b Primer 2
ctcacctgcggtgcggtag

SEQ ID NO: 152 - DNA, 22 bp, Artificial Sequence
  Description of Artificial Sequence: NOV6c Primer 1
gtttggggatgtggtccttgct

SEQ ID NO: 153 - DNA, 19 bp, Artificial Sequence
  Description of Artificial Sequence: NOV6c Primer 2
ctcacctgcggtgcggtag

SEQ ID NO: 154 - DNA, 25 bp, Artificial Sequence
  Description of Artificial Sequence: NOV8 Primer 1
gcgactggagctttctgggaagact

SEQ ID NO: 155 - DNA, 25 bp, Artificial Sequence
  Description of Artificial Sequence: NOV8 Primer 2
cactagatggccaagtcctccggtc

SEQ ID NO: 156 - DNA, 27 bp, Artificial Sequence
  Description of Artificial Sequence: NOV12a Primer 1
atgaaggtaaaaggcagaggaatcacc

SEQ ID NO: 157 - DNA, 27 bp, Artificial Sequence
  Description of Artificial Sequence: NOV12a Primer 2
gccacacagcgataataaccttggtct

SEQ ID NO: 158 - DNA, 24 bp, Artificial Sequence
  Description of Artificial Sequence: NOV13 Primer 1
ggcctccgggatttgctacctttt

SEQ ID NO: 159 - DNA, 22 bp, Artificial Sequence
  Description of Artificial Sequence: NOV13 Primer 2
agttaccccacagtccctggac

SEQ ID NO: 160 - DNA, 22 bp, Artificial Sequence
  Description of Artificial Sequence: Ag2708 Forward Primer
ggtgctcatcttgcttttaaca

SEQ ID NO: 161 - DNA, 26 bp, Artificial Sequence
  Description of Artificial Sequence: Ag2708 Probe Primer
tctttgtgaggttcctccattgctca

SEQ ID NO: 162 - DNA, 22 bp, Artificial Sequence
  Description of Artificial Sequence: Ag2708 Reverse Primer
gtagtgtcaacacaggcaagct

SEQ ID NO: 163 - DNA, 21 bp, Artificial Sequence
  Description of Artificial Sequence: Ag299 Forward Primer
gtgatggcatttgaccgctat

SEQ ID NO: 164 - DNA, 25 bp, Artificial Sequence
  Description of Artificial Sequence: Ag299 Probe Primer
agctgtttgcaggcccctccactac

SEQ ID NO: 165 - DNA, 25 bp, Artificial Sequence
  Description of Artificial Sequence: Ag299 Reverse Primer
catacagacaagggtgcatgactac

SEQ ID NO: 166 - DNA, 22 bp, Artificial Sequence
  Description of Artificial Sequence: Ag1347 Forward Primer
acaccatcattacacccatgat

SEQ ID NO: 167 - DNA, 29 bp, Artificial Sequence
  Description of Artificial Sequence: Ag1347 Probe Primer
cccctcatatatacactgaggaacaagga

SEQ ID NO: 168 - DNA, 22 bp, Artificial Sequence
  Description of Artificial Sequence: Ag1347 Reverse Primer
gcaccttcttaagtgctccttt

SEQ ID NO: 169 - DNA, 21 bp, Artificial Sequence
  Description of Artificial Sequence: Ag2597 Forward Primer
ggagctttctgggaagactct

SEQ ID NO: 170 - DNA, 26 bp, Artificial Sequence
  Description of Artificial Sequence: Ag2597 Probe Primer
tagaaaatgcacaggagcactccacg

SEQ ID NO: 171 - DNA, 20 bp, Artificial Sequence
  Description of Artificial Sequence: Ag2597 Reverse Primer
caaaatgcggaagatgaaca

SEQ ID NO: 172 - DNA, 22 bp, Artificial Sequence
  Description of Artificial Sequence: Ag5234 Forward Primer
cttcatcatcttcatgctggcg

SEQ ID NO: 173 - DNA, 28 bp, Artificial Sequence
  Description of Artificial Sequence: Ag5234 Probe Primer
cactgctgctcaacatgctggagatata

SEQ ID NO: 174 - DNA, 19 bp, Artificial Sequence
  Description of Artificial Sequence: Ag5234 Reverse Primer
ggctggtcacgccctgctt

SEQ ID NO: 175 - DNA, 22 bp, Artificial Sequence
  Description of Artificial Sequence: Ag4811 Forward Primer
catgtctcttttcgggaacata

SEQ ID NO: 176 - DNA, 28 bp, Artificial Sequence
  Description of Artificial Sequence: Ag4811 Probe Primer
cacagtaaacatcaccttcttggaagtg

SEQ ID NO: 177 - DNA, 22 bp, Artificial Sequence
  Description of Artificial Sequence: Ag4811 Reverse Primer
gaaggccataatcttccatttt

SEQ ID NO: 178 - DNA, 22 bp, Artificial Sequence
  Description of Artificial Sequence: Ag4845 Forward Primer
catgtctcttttcgggaacata

SEQ ID NO: 179 - DNA, 28 bp, Artificial Sequence
  Description of Artificial Sequence: Ag4845 Probe Primer
cacagtaaacatcaccttcttggaagtg

SEQ ID NO: 180 - DNA, 22 bp, Artificial Sequence
  Description of Artificial Sequence: Ag4845 Reverse Primer
gaaggccataatcttccatttt

SEQ ID NO: 181 - DNA, 21 bp, Artificial Sequence
  Description of Artificial Sequence: Ag4944 Forward Primer
cagggaagcagtacgaggttt

SEQ ID NO: 182 - DNA, 30 bp, Artificial Sequence
  Description of Artificial Sequence: Ag4944  Probe Primer
tggaggaagtgtccctaaaatcatttatcc

SEQ ID NO: 183 - DNA, 20 bp, Artificial Sequence
  Description of Artificial Sequence: Ag4944 Reverse Primer
tgactctccagcatcgtaga

SEQ ID NO: 184 - DNA, 22 bp, Artificial Sequence
  Description of Artificial Sequence: Ag4811 Forward Primer
catgtctcttttcgggaacata

SEQ ID NO: 185 - DNA, 28 bp, Artificial Sequence
  Description of Artificial Sequence: Ag4811 Probe Primer
cacagtaaacatcaccttcttggaagtg

SEQ ID NO: 186 - DNA, 22 bp, Artificial Sequence
  Description of Artificial Sequence: Ag4811 Reverse Primer
gaaggccataatcttccatttt

SEQ ID NO: 187 - DNA, 22 bp, Artificial Sequence
  Description of Artificial Sequence: Ag4845 Forward Primer
catgtctcttttcgggaacata

SEQ ID NO: 188 - DNA, 28 bp, Artificial Sequence
  Description of Artificial Sequence: Ag4845 Probe Primer
cacagtaaacatcaccttcttggaagtg

SEQ ID NO: 189 - DNA, 22 bp, Artificial Sequence
  Description of Artificial Sequence: Ag4845 Reverse Primer
gaaggccataatcttccatttt

SEQ ID NO: 190 - DNA, 22 bp, Artificial Sequence
  Description of Artificial Sequence: Ag4946 Forward Primer
ggcatcactgtgagcattagta

SEQ ID NO: 191 - DNA, 29 bp, Artificial Sequence
  Description of Artificial Sequence: Ag4946 Probe Primer
ctctgattgtggactgcaatgtaacagac

SEQ ID NO: 192 - DNA, 20 bp, Artificial Sequence
  Description of Artificial Sequence: Ag4946 Reverse Primer
tgactctccagcatcgtaga

SEQ ID NO: 193 - DNA, 22 bp, Artificial Sequence
  Description of Artificial Sequence: Ag2451 Forward Primer
ggccaagtaatgacaatttgaa

SEQ ID NO: 194 - DNA, 28 bp, Artificial Sequence
  Description of Artificial Sequence: Ag2451 Probe Primer
tcagtttattcctaacaatgagaacgca

SEQ ID NO: 195 - DNA, 22 bp, Artificial Sequence
  Description of Artificial Sequence: Ag2451 Reverse Primer
tgcaaaatgttatcagcttgtg

SEQ ID NO: 196 - DNA, 22 bp, Artificial Sequence
  Description of Artificial Sequence: Ag1455 Forward Primer
caggatttggatccattgtaga

SEQ ID NO: 197 - DNA, 26 bp, Artificial Sequence
  Description of Artificial Sequence: Ag1455 Probe Primer
caaaatacacttcggcaagccagagt

SEQ ID NO: 198 - DNA, 22 bp, Artificial Sequence
  Description of Artificial Sequence: Ag1455 Reverse Primer
cacatcagtgcttatggtttcc

SEQ ID NO: 199 - DNA, 21 bp, Artificial Sequence
  Description of Artificial Sequence: Ag1489 Forward
cacagcattgaattgctctgt

SEQ ID NO: 200 - DNA, 26 bp, Artificial Sequence
  Description of Artificial Sequence: Ag1489 Probe Primer
tctggattttaccaaatggcacacga

SEQ ID NO: 201 - DNA, 22 bp, Artificial Sequence
  Description of Artificial Sequence: Ag1489 Reverse Primer
gataactttgtggtccattgga

SEQ ID NO: 202 - DNA, 21 bp, Artificial Sequence
  Description of Artificial Sequence: Ag3032 Forward Primer
cacctgaagaacccacagatt

SEQ ID NO: 203 - DNA, 29 bp, Artificial Sequence
  Description of Artificial Sequence: Ag3032 Probe Primer
tgctattaaaactacagccatgtcaaaga

SEQ ID NO: 204 - DNA, 21 bp, Artificial Sequence
  Description of Artificial Sequence: Ag3032 Reverse Primer
gcttgacatggttgggtttat

SEQ ID NO: 205 - DNA, 21 bp, Artificial Sequence
  Description of Artificial Sequence: Ag4335 Forward Primer
cacctgaagaacccacagatt

SEQ ID NO: 206 - DNA, 29 bp, Artificial Sequence
  Description of Artificial Sequence: Ag4335 Probe Primer
tgctattaaaactacagccatgtcaaaga

SEQ ID NO: 207 - DNA, 21 bp, Artificial Sequence
  Description of Artificial Sequence: Ag4335 Reverse Primer
gcttgacatggttgggtttat

SEQ ID NO: 208 - DNA, 21 bp, Artificial Sequence
  Description of Artificial Sequence: Ag317 Forward Primer
ggatttcgggctacacatacg

SEQ ID NO: 209 - DNA, 32 bp, Artificial Sequence
  Description of Artificial Sequence: Ag317 Probe Primer
actctccagaatcgagcagtttcactttgttg

SEQ ID NO: 210 - DNA, 20 bp, Artificial Sequence
  Description of Artificial Sequence: Ag317 Reverse Primer
atgccaatgggtctttgacc

SEQ ID NO: 211 - DNA, 19 bp, Artificial Sequence
  Description of Artificial Sequence: Ag674 Forward Primer
gtcatccccactgggattt

SEQ ID NO: 212 - DNA, 27 bp, Artificial Sequence
  Description of Artificial Sequence: Ag674 Probe Primer
cgtactctccagaatcgagcagtttca

SEQ ID NO: 213 - DNA, 20 bp, Artificial Sequence
  Description of Artificial Sequence: Ag674 Reverse Primer
caatgggtctttgaccatca

SEQ ID NO: 214 - DNA, 21 bp, Artificial Sequence
  Description of Artificial Sequence: Ag2313 Forward Primer
tatcttgatgatggccattca

SEQ ID NO: 215 - DNA, 26 bp, Artificial Sequence
  Description of Artificial Sequence: Ag2313 Probe Primer
tccaatacctccaccagaagcaattt

SEQ ID NO: 216 - DNA, 22 bp, Artificial Sequence
  Description of Artificial Sequence: Ag2313 Reverse Primer
caccagaacactggaacagaat

SEQ ID NO: 217 - DNA, 21 bp, Artificial Sequence
  Description of Artificial Sequence: Ag401 Forward Primer
ttgtgccaaaacatccatcct

SEQ ID NO: 218 - DNA, 29 bp, Artificial Sequence
  Description of Artificial Sequence: Ag401 Probe Primer
agcctggagaagctctcactcaacattgc

SEQ ID NO: 219 - DNA, 20 bp, Artificial Sequence
  Description of Artificial Sequence: Ag401 Reverse Primer
tatgatgcggacctcccagt

SEQ ID NO: 220 - DNA, 21 bp, Artificial Sequence
  Description of Artificial Sequence: Ag3195 Forward Primer
aatagttttgctgaccagagg

SEQ ID NO: 221 - DNA, 21 bp, Artificial Sequence
  Description of Artificial Sequence: Ag3195 Probe Primer
cccagcaagtgtgtggtggag

SEQ ID NO: 222 - DNA, 22 bp, Artificial Sequence
  Description of Artificial Sequence: Ag3195 Reverse Primer
tgatctttaccatcagatgagt

SEQ ID NO: 223 - DNA, 21 bp, Artificial Sequence
  Description of Artificial Sequence: Ag401 Forward Primer
ttgtgccaaaacatccatcct

SEQ ID NO: 224 - DNA, 29 bp, Artificial Sequence
  Description of Artificial Sequence: Ag401 Probe Primer
agcctggagaagctctcactcaacattgc

SEQ ID NO: 225 - DNA, 20 bp, Artificial Sequence
  Description of Artificial Sequence: Ag401 Reverse Primer
tatgatgcggacctcccagt

SEQ ID NO: 226 - DNA, 21 bp, Artificial Sequence
  Description of Artificial Sequence: Ag3154 Forward Primer
ccgtaatgctgtcccacttat

SEQ ID NO: 227 - DNA, 29 bp, Artificial Sequence
  Description of Artificial Sequence: Ag3154 Probe Primer
tgtgctctacttagcattctcagggatca

SEQ ID NO: 228 - DNA, 22 bp, Artificial Sequence
  Description of Artificial Sequence: Ag3154 Reverse Primer
aggagaacgcagacatactgaa

SEQ ID NO: 229 - DNA, 21 bp, Artificial Sequence
  Description of Artificial Sequence: Ag401 Forward Primer
ttgtgccaaaacatccatcct

SEQ ID NO: 230 - DNA, 29 bp, Artificial Sequence
  Description of Artificial Sequence: Ag401 Probe Primer
agcctggagaagctctcactcaacattgc

SEQ ID NO: 231 - DNA, 20 bp, Artificial Sequence
  Description of Artificial Sequence: Ag401 Reverse Primer
tatgatgcggacctcccagt

SEQ ID NO: 232 - DNA, 21 bp, Artificial Sequence
  Description of Artificial Sequence: Ag3195 Forward Primer
aatagttttgctgaccagagg

SEQ ID NO: 233 - DNA, 21 bp, Artificial Sequence
  Description of Artificial Sequence: Ag3195 Probe Primer
cccagcaagtgtgtggtggag

SEQ ID NO: 234 - DNA, 22 bp, Artificial Sequence
  Description of Artificial Sequence: Ag3195 Reverse Primer
tgatctttaccatcagatgagt

SEQ ID NO: 235 - DNA, 21 bp, Artificial Sequence
  Description of Artificial Sequence: Ag401 Forward Primer
ttgtgccaaaacatccatcct

SEQ ID NO: 236 - DNA, 29 bp, Artificial Sequence
  Description of Artificial Sequence: Ag401 Probe Primer
agcctggagaagctctcactcaacattgc

SEQ ID NO: 237 - DNA, 20 bp, Artificial Sequence
  Description of Artificial Sequence: Ag401 Reverse Primer
tatgatgcggacctcccagt

SEQ ID NO: 238 - DNA, 39 bp, Artificial Sequence
  Description of Artificial Sequence: NOV1b-1d Primer F1
agatctgtccaaggaagggaaacagctatggaaggggaa

SEQ ID NO: 239 - DNA, 36 bp, Artificial Sequence
  Description of Artificial Sequence: NOV1b-1d Primer R1
ctcgagcataccagtctttgaggcaatccaatctcg

SEQ ID NO: 240 - DNA, 26 bp, Artificial Sequence
  Description of Artificial Sequence: NOV12b-12e SF! Primer
aaagtccgaaaacttcagaaagatac

SEQ ID NO: 241 - DNA, 26 bp, Artificial Sequence
  Description of Artificial Sequence: NOV12b-12e SF2 Primer
cttgtctgataacttcctgacctccc

SEQ ID NO: 242 - DNA, 27 bp, Artificial Sequence
  Description of Artificial Sequence: NOV12b-12e SR1 Primer
ttatagctcatttttaagaccatcagt

SEQ ID NO: 243 - DNA, 28 bp, Artificial Sequence
  Description of Artificial Sequence: NOV12b-e SR2 Primer
caggaagttatcagacaagtataggaac

SEQ ID NO: 244 - DNA, 18 bp, Artificial Sequence
  Description of Artificial Sequence: NOV11c SF1 Primer
gccctcccggtccaggtc

SEQ ID NO: 245 - DNA, 19 bp, Artificial Sequence
  Description of Artificial Sequence: NOV11c SF2 Primer
ggcgacggcaccagcatgt

SEQ ID NO: 246 - DNA, 19 bp, Artificial Sequence
  Description of Artificial Sequence: NOV11c SR1 Primer
gcctggcctgccgggttct

SEQ ID NO: 247 - DNA, 19 bp, Artificial Sequence
  Description of Artificial Sequence: NOV11c SR2 Primer
catgagcacgtggtaagcg

SEQ ID NO: 248 - DNA, 24 bp, Artificial Sequence
  Description of Artificial Sequence: NOV1b SF1 Primer
gtgctggcattggagtgtttagtg

SEQ ID NO: 249 - DNA, 25 bp, Artificial Sequence
  Description of Artificial Sequence: NOV1b SF2 Primer
atcaagcacgttgacacagaatgag

SEQ ID NO: 250 - DNA, 27 bp, Artificial Sequence
  Description of Artificial Sequence: NOV1b SF3 Primer
gcattcactaacctaacaccatttaca

SEQ ID NO: 251 - DNA, 27 bp, Artificial Sequence
  Description of Artificial Sequence: NOV1b SF4 Primer
gttcagcagagatgtcgtctgaccttc

SEQ ID NO: 252 - DNA, 25 bp, Artificial Sequence
  Description of Artificial Sequence: NOV1b SF5 Primer
gggatcctccagatcctgtattttt

SEQ ID NO: 253 - DNA, 27 bp, Artificial Sequence
  Description of Artificial Sequence: NOV1b SF6 Primer
tgaagaacacatcaacaacagacataa

SEQ ID NO: 254 - DNA, 27 bp, Artificial Sequence
  Description of Artificial Sequence: NOV1b SR1 Primer
actgttttcagcagctaccttaatttc

SEQ ID NO: 255 - DNA, 24 bp, Artificial Sequence
  Description of Artificial Sequence: NOV1b SR2 Primer
cttgatgaatgtgtggtacgcgat

SEQ ID NO: 256 - DNA, 26 bp, Artificial Sequence
  Description of Artificial Sequence: NOV1b SR3 Primer
gtgaatgcaaacttgaggtcttttgt

SEQ ID NO: 257 - DNA, 29 bp, Artificial Sequence
  Description of Artificial Sequence: NOV1b SR4 Primer
cctcatataatcctaccattggctgtact

SEQ ID NO: 258 - DNA, 27 bp, Artificial Sequence
  Description of Artificial Sequence: NOV1b SR5 Primer
gaggatcccagtgtaaaaatacttctg

SEQ ID NO: 259 - DNA, 27 bp, Artificial Sequence
  Description of Artificial Sequence: NOV1b SR6 Primer
tagcacttcataagcaataatgatccc

SEQ ID NO: 260 - DNA, 28 bp, Artificial Sequence
  Description of Artificial Sequence: NOV1b SR7 Primer
tgagtgtactagcagacacctcaatgat

What is claimed is:

1. An isolated polypeptide comprising an amino acid sequence selected from the group consisting of:
(a) a mature form of an amino acid sequence selected from the group consisting of SEQ ID NOS: 2, 4, 6, 8, 10, 12, 14, 16, 18, 20, 22, 24, 26, 28, 30, 32, 34, 26, 28, 40, 42, 44, 46, 48, 50, 52, 54, 56, and 58;
(b) a variant of a mature form of an amino acid sequence selected from the group consisting of SEQ ID NOS: 2, 4, 6, 8, 10, 12, 14, 16, 18, 20, 22, 24, 26, 28, 30, 32, 34, 26, 28, 40, 42, 44, 46, 48, 50, 52, 54, 56, and 58, wherein one or more amino acid residues in said variant differs from the amino acid sequence of said mature form, provided that said variant differs in no more than 15% of the amino acid residues from the amino acid sequence of said mature form;
(c) an amino acid sequence selected from the group consisting SEQ ID NOS: 2, 4, 6, 8, 10, 12, 14, 16, 18, 20, 22, 24, 26, 28, 30, 32, 34, 26, 28, 40, 42, 44, 46, 48, 50, 52, 54, 56, and 58; and
(d) a variant of an amino acid sequence selected from the group consisting of SEQ ID NOS: 2, 4, 6, 8, 10, 12, 14, 16, 18, 20, 22, 24, 26, 28, 30, 32, 34, 26, 28, 40, 42, 44, 46, 48, 50, 52, 54, 56, and 58, wherein one or more amino acid residues in said variant differs from the amino acid sequence of said mature form, provided that said variant differs in no more than 15% of amino acid residues from said amino acid sequence.

2. The polypeptide of claim 1, wherein said polypeptide comprises the amino acid sequence of a naturally-occurring allelic variant of an amino acid sequence selected from the group consisting SEQ ID NOS: 2, 4, 6, 8, 10, 12, 14, 16, 18, 20, 22, 24, 26, 28, 30, 32, 34, 26, 28, 40, 42, 44, 46, 48, 50, 52, 54, 56, and 58.

3. The polypeptide of claim 2, wherein said allelic variant comprises an amino acid sequence that is the translation of a nucleic acid sequence differing by a single nucleotide from a nucleic acid sequence selected from the group consisting of SEQ ID NOS: 1, 3, 5, 7, 9, 11, 13, 15, 17, 19, 21, 23, 25, 27, 29, 31, 33, 35, 37, 39, 41, 43, 45, 47, 49, 51, 53, 55, and 57.

4. The polypeptide of claim 1, wherein the amino acid sequence of said variant comprises a conservative amino acid substitution.

5. An isolated nucleic acid molecule comprising a nucleic acid sequence encoding a polypeptide comprising an amino acid sequence selected from the group consisting of:
(a) a mature form of an amino acid sequence selected from the group consisting of SEQ ID NOS: 2, 4, 6, 8, 10, 12, 14, 16, 18, 20, 22, 24, 26, 28, 30, 32, 34, 26, 28, 40, 42, 44, 46, 48, 50, 52, 54, 56, and 58;
(b) a variant of a mature form of an amino acid sequence selected from the group consisting of SEQ ID NOS: 2, 4, 6, 8, 10, 12, 14, 16, 18, 20, 22, 24, 26, 28, 30, 32, 34, 26, 28, 40, 42, 44, 46, 48, 50, 52, 54, 56, and 58, wherein one or more amino acid residues in said variant differs from the amino acid sequence of said mature form, provided that said variant differs in no more than 15% of the amino acid residues from the amino acid sequence of said mature form;
(c) an amino acid sequence selected from the group consisting of SEQ ID NOS: 2, 4, 6, 8, 10, 12, 14, 16, 18, 20, 22, 24, 26, 28, 30, 32, 34, 26, 28, 40, 42, 44, 46, 48, 50, 52, 54, 56, and 58;
(d) a variant of an amino acid sequence selected from the group consisting SEQ ID NOS: 2, 4, 6, 8, 10, 12, 14, 16, 18, 20, 22, 24, 26, 28, 30, 32, 34, 26, 28, 40, 42, 44, 46, 48, 50, 52, 54, 56, and 58, wherein one or more amino acid residues in said variant differs from the amino acid sequence of said mature form, provided that said variant differs in no more than 15% of amino acid residues from said amino acid sequence;
(e) a nucleic acid fragment encoding at least a portion of a polypeptide comprising an amino acid sequence chosen from the group consisting of SEQ ID NOS: 2, 4, 6, 8, 10, 12, 14, 16, 18, 20, 22, 24, 26, 28, 30, 32, 34, 26, 28, 40, 42, 44, 46, 48, 50, 52, 54, 56, and 58, or a variant of said polypeptide, wherein one or more amino acid residues in said variant differs from the amino acid sequence of said mature form, provided that said variant differs in no more than 15% of amino acid residues from said amino acid sequence; and
(f) a nucleic acid molecule comprising the complement of (a), (b), (c), (d) or (e).

6. The nucleic acid molecule of claim 5, wherein the nucleic acid molecule comprises the nucleotide sequence of a naturally-occurring allelic nucleic acid variant.

7. The nucleic acid molecule of claim 5, wherein the nucleic acid molecule encodes a polypeptide comprising the amino acid sequence of a naturally-occurring polypeptide variant.

8. The nucleic acid molecule of claim 5, wherein the nucleic acid molecule differs by a single nucleotide from a nucleic acid sequence selected from the group consisting of SEQ ID NOS: 1, 3, 5, 7, 9, 11, 13, 15, 17, 19, 21, 23, 25, 27, 29, 31, 33, 35, 37, 39, 41, 43, 45, 47, 49, 51, 53, 55, and 57.

9. The nucleic acid molecule of claim 5, wherein said nucleic acid molecule comprises a nucleotide sequence selected from the group consisting of:
(a) a nucleotide sequence selected from the group consisting of SEQ ID NOS: 1, 3, 5, 7, 9, 11, 13, 15, 17, 19, 21, 23, 25, 27, 29, 31, 33, 35, 37, 39, 41, 43, 45, 47, 49, 51, 53, 55, and 57;
(b) a nucleotide sequence differing by one or more nucleotides from a nucleotide sequence selected from the group consisting of SEQ ID NOS: 1, 3, 5, 7, 9, 11, 13, 15, 17, 19, 21, 23, 25, 27, 29, 31, 33, 35, 37, 39, 41, 43, 45, 47, 49, 51, 53, 55, and 57, provided that no more than 20% of the nucleotides differ from said nucleotide sequence;
(c) a nucleic acid fragment of (a); and
(d) a nucleic acid fragment of (b).

10. The nucleic acid molecule of claim 5, wherein said nucleic acid molecule hybridizes under stringent conditions to a nucleotide sequence chosen from the group consisting SEQ ID NOS: 1, 3, 5, 7, 9, 11, 13, 15, 17, 19, 21, 23, 25, 27, 29, 31, 33, 35, 37, 39, 41, 43, 45, 47, 49, 51, 53, 55, and 57, or a complement of said nucleotide sequence.

11. The nucleic acid molecule of claim 5, wherein the nucleic acid molecule comprises a nucleotide sequence selected from the group consisting of:
(a) a first nucleotide sequence comprising a coding sequence differing by one or more nucleotide sequences from a coding sequence encoding said amino acid sequence, provided that no more than 20% of the nucleotides in the coding sequence in said first nucleotide sequence differ from said coding sequence;
(b) an isolated second polynucleotide that is a complement of the first polynucleotide; and
(c) a nucleic acid fragment of (a) or (b).

12. A vector comprising the nucleic acid molecule of claim 11.

13. The vector of claim 12, further comprising a promoter operably-linked to said nucleic acid molecule.

14. A cell comprising the vector of claim 12.

15. An antibody that binds immunospecifically to the polypeptide of claim 1.

16. The antibody of claim 15, wherein said antibody is a monoclonal antibody.

17. The antibody of claim 15, wherein the antibody is a humanized antibody.

18. A method for determining the presence or amount of the polypeptide of claim 1 in a sample, the method comprising:
(a) providing the sample;
(b) contacting the sample with an antibody that binds immunospecifically to the polypeptide; and
(c) determining the presence or amount of antibody bound to said polypeptide, thereby determining the presence or amount of polypeptide in said sample.

19. A method for determining the presence or amount of the nucleic acid molecule of claim 5 in a sample, the method comprising:
(a) providing the sample;
(b) contacting the sample with a probe that binds to said nucleic acid molecule; and
(c) determining the presence or amount of the probe bound to said nucleic acid molecule, thereby determining the presence or amount of the nucleic acid molecule in said sample.

20. The method of claim 19 wherein presence or amount of the nucleic acid molecule is used as a marker for cell or tissue type.

21. The method of claim 20 wherein the cell or tissue type is cancerous.

22. A method of identifying an agent that binds to a polypeptide of claim 1, the method comprising:
(a) contacting said polypeptide with said agent; and
(b) determining whether said agent binds to said polypeptide.

23. The method of claim 22 wherein the agent is a cellular receptor or a downstream effector.

24. A method for identifying an agent that modulates the expression or activity of the polypeptide of claim 1, the method comprising:
(a) providing a cell expressing said polypeptide;
(b) contacting the cell with said agent, and
(c) determining whether the agent modulates expression or activity of said polypeptide,
whereby an alteration in expression or activity of said peptide indicates said agent modulates expression or activity of said polypeptide.

25. A method for modulating the activity of the polypeptide of claim 1, the method comprising contacting a cell sample expressing the polypeptide of said claim with a compound that binds to said polypeptide in an amount sufficient to modulate the activity of the polypeptide.

26. A method of treating or preventing a NOVX-associated disorder, said method comprising administering to a subject in which such treatment or prevention is desired the polypeptide of claim 1 in an amount sufficient to treat or prevent said NOVX-associated disorder in said subject.

27. The method of claim 26 wherein the disorder is selected from the group consisting of cardiomyopathy and atherosclerosis.

28. The method of claim 26 wherein the disorder is related to cell signal processing and metabolic pathway modulation.

29. The method of claim 26, wherein said subject is a human.

30. A method of treating or preventing a NOVX-associated disorder, said method comprising administering to a subject in which such treatment or prevention is desired the nucleic acid of claim 5 in an amount sufficient to treat or prevent said NOVX-associated disorder in said subject.

31. The method of claim 30 wherein the disorder is selected from the group consisting of cardiomyopathy and atherosclerosis.

32. The method of claim 30 wherein the disorder is related to cell signal processing and metabolic pathway modulation.

33. The method of claim 30, wherein said subject is a human.

34. A method of treating or preventing a NOVX-associated disorder, said method comprising administering to a subject in which such treatment or prevention is desired the antibody of claim 15 in an amount sufficient to treat or prevent said NOVX-associated disorder in said subject.

35. The method of claim 34 wherein the disorder is diabetes.

36. The method of claim 34 wherein the disorder is related to cell signal processing and metabolic pathway modulation.

37. The method of claim 34, wherein the subject is a human.

38. A pharmaceutical composition comprising the polypeptide of claim 1 and a pharmaceutically-acceptable carrier.

39. A pharmaceutical composition comprising the nucleic acid molecule of claim 5 and a pharmaceutically-acceptable carrier.

40. A pharmaceutical composition comprising the antibody of claim 15 and a pharmaceutically-acceptable carrier.

41. A kit comprising in one or more containers, the pharmaceutical composition of claim 38.

42. A kit comprising in one or more containers, the pharmaceutical composition of claim 39.

43. A kit comprising in one or more containers, the pharmaceutical composition of claim 40.

44. A method for determining the presence of or predisposition to a disease associated with altered levels of the polypeptide of claim 1 in a first mammalian subject, the method comprising:
(a) measuring the level of expression of the polypeptide in a sample from the first mammalian subject; and
(b) comparing the amount of said polypeptide in the sample of step (a) to the amount of the polypeptide present in a control sample from a second mammalian subject known not to have, or not to be predisposed to, said disease;
wherein an alteration in the expression level of the polypeptide in the first subject as compared to the control sample indicates the presence of or predisposition to said disease.

45. The method of claim 44 wherein the predisposition is to a cancer.

46. A method for determining the presence of or predisposition to a disease associated with altered levels of the nucleic acid molecule of claim 5 in a first mammalian subject, the method comprising:
(a) measuring the amount of the nucleic acid in a sample from the first mammalian subject; and
(b) comparing the amount of said nucleic acid in the sample of step (a) to the amount of the nucleic acid present in a control sample from a second mammalian subject known not to have or not be predisposed to, the disease;
wherein an alteration in the level of the nucleic acid in the first subject as compared to the control sample indicates the presence of or predisposition to the disease.

47. The method of claim 46 wherein the predisposition is to a cancer.

48. A method of treating a pathological state in a mammal, the method comprising administering to the mammal a polypeptide in an amount that is sufficient to alleviate the pathological state, wherein the polypeptide is a polypeptide having an amino acid sequence at least 95% identical to a polypeptide comprising an amino acid sequence of at least one of SEQ ID NOS: 2, 4, 6, 8, 10, 12, 14, 16, 18, 20, 22, 24, 26, 28, 30, 32, 34, 26, 28, 40, 42, 44, 46, 48, 50, 52, 54, 56, and 58, or a biologically active fragment thereof.

49. A method of treating a pathological state in a mammal, the method comprising administering to the mammal the antibody of claim 15 in an amount sufficient to alleviate the pathological state.
